United States Patent Application Publication US 2025/0179533 A1 - sequence listing, part 3

SEQ ID NO: 6 - DNA, 3042528 bp, synthetic construct (residues 1,521,265-3,042,528 of 3,042,528)
  source 1..3042528: mol_type = other DNA; note = MTMR2 Contig Sequence
  misc_difference 1..3042528: note = N can be a,g,c,t
tgagtttttccagctctgttgtgttgtgatatttgacggaagcctaccctatcactttgtgttctcattttcacaattccctgctgtttacttgaaaactccactcatagaactgtcatcccactccaagaaatcacgaatggagctaaagggaaatggcagatctagtagctcagttctccaagtcataaataagaagatgactctcccaaaggtagtttttttaatacagaagccagaccaaaccttgactccaagtatttgtcgtttgcatttcagtgcacttcctgcaagaatgtcaacaaaagaacaaccaaaccaatgaagactttcctcaaactgtcatctccagcaaagtcagtttcagatgtacatacttgttcattttaattgtgacacaatatagacatacattaactaacatgtattcatatgtaacattataatgtatagcattcacacatattagtatatttcatataaaattttatatttagtagactttttacagtcacacatattttacttgttattgacatgttttgtagagttgccatcatctgtatctccctgcaataagtagttcattttctccaaaagatatttttatggaagaccttttagaatttattccctgaattaaaaaaacatagagcaattaataattaagtatggtacaacattgcaaagggttcacctatttacttattctttcattcaacatatttttaggtggcaggtaacctgccattattggtagatattacagaaataacagaaaattgtatggctagcaaggatccttgtaggagatttaaacattaaattaaattaaatttaaacaataaggaaggtcccagtggaatgctaaggtttttaagatatgacaactttaatgaagattaattaccatctgcaaagatatgcagcaagatctggtcatgtcatggagctcagagaagcttaccctgcctgttcagtttatttgacatcttaatgatgagtataatgggtacactgaggcattagtggaacagggagtagacagtgaattcccggaatgagacttaaagaagaaatggcaccaagtggtgtagaggacaacctaatcacgcctgcttgggcgtggtcaggcacacctgtagccagctccaagtaggcatggttagggcgtcccctacaacatattgataattcaccttttaaggctggaaacaagaagcagtggagcttcacctgaacaagacagatgctgtctgacaacactaacatgagtaagtaccatggcctgaggccacataagggatatgaagagatgtattttctttgtcctaatacaaagggggagtcctacaagccttttgaggtgataacttaatgaaaacctttccattgtgaaaacatatttcagatgaagtacagacagcaaataggagcagagcctctatagtatatagccattacttgaaaagattgtaagagtgggactgataaattgagcaaggagcaacgaagagaccctgtctcaaacaagaaagataaaggataggtgaatgcctgggttttctcaaacctccacacatgccatgggatacaagtggtttcactcaagcacatgatcacagagatttcaaaaggaatgagtcatctcacttgtgagaaacagcaaaggagggtttgaatggaatgtgatggtatttagacttaggtaaataagagcatgtcattttactttaggcaatgttaaaagtatcaaaagtatctctcttcatgtgaggtgtggtttcagtgccagaataaattatgttagaccttaattttaaaacaatctattgtcaaatgattaaggtatgggaatcttgtttttctggttgtctcaatagggggagacttttctgtgggtagagactacacatggagaagaaggaaatgcattgtgagatgtctcagattggctgtgacaaaagtaggactaaagaagtaggcaattaatacataattatacacaacttgtcacattggtatatggaccaagaactctttcctctgtcataaatgcatttccatttatcattactagaaggaacagctgtttgaacttctcaaaggcacaagttattcttagaagtttcatgttttgaaggaagcatttacattcagccagtcttagactaactatgtctccttgctttccattccaatcttattagacaaaaggtttgagaaggtcaaacagggtggtgtgggttggaaactcacacaagagacccttaagggagaatcattaacactcttgtaaaggtcaaatggattcttatattttttacttagttttgatttttgagctagaataaaatgagataaaatagtaaaagaccaaagtaaaagtaaagagctggcagttgagcagggaagggagaaagacagggtgtgagtgtgaacccagaaaataactatgcaaaatcctggttagggaagaggatttacaaaaggaagtccttcagaggaaataaataaaattactacctatctgtgccaaatattcaaacaatatgattaaacaaaccactgggcttaagagaaaattgtaaataacacagatatatagcagtaatgcaatgtttgtagaaatttacaaagtcaaaatttcatcaagccaaaggctgggtgtagctcagtaggtagagtgctcatctaacaggtacaaagatcttgattcaattcccagcaccatataactgatgtgggcaggagcacacctgtagtcacagcacatgagaggcgaaggcaggtggttcagatcaaagtcatctttagctatacatagtaagtgagaagaaagcacaggacacatgaggacctatctcaaaggataaatcatttaacaatatagccgaaattctagtctcagtgctatgtcatcagcatggtccatggtgcctatgggtacaggcgcagctgtcactggacctatggccacccccttttatcttgttaggttatagcgatttgctgcccagatgacaccttttaaataatgacaaaattactttctcacagaacctgaggaaggtgtacactcagtctctgctctcccccatcacatggtctctgaacagcctcttttggtaaactttcaatcaaagggtacaacttttccaacaagaaagaatgttgcatggcattaaaatgtaatgttgcatttataaaattcacagtatagtatagaaacacaatcagtttatgaaggttgaaaacatatttcctttaactccccaacatcacactgaaaaactgtcatcattacattgtttacaaatggaggacagagctggagggttaagtaaaagtggtgtaagttatacagaaagggactggccagcttctattgtgatgcttgactccaggaagaagttagaaaagaaaatgaggtttacagaggttctgcacatgaacagaagttcacacaacaggcgggattcagagaatgcaagccatgcaattatgcaaaaatggcagaggataaatgagtattttatccattattttttttccaagtttccaagaatagcaaattctctgatccatatttctaactgacaaaaattaacagctttagttttaactggaagcattttcctccatatactctgtgaaagtatcatttccaaacatggcatgaaggtctcagatcttgaaatgtgaacacataagcactgtctccttgcatgataaataaaatagttgctctcatatggctatcccagggactgtaaaatgaaatacaaattcatatatcctctacttactaatttataaggcagatattgaatatttaatacttttatgaattaatggaaaagctataatgccaagaaaatggatgggctgtgcttgaacaacttttcaagtacccatctccttcacagcatctatttgtaagggatacagcagatgaggaccagaattttaagaggatgtgcattttcatcagatcctgccagaaaaacatgtaccacatacccaagatgcccagggtggcagtgagatgttgggttagtgggcaaggaatcagggcaaagaggtgaggctgtcttaaaggctaatgtcatgtgattctatgcttaaaattagttcaaatataaagcatagatgcctttcacaaatctagttagaatgtctcttctcatttcctttctaatttagccatctggattaagaaaacatctgtccattcatgaaaagtacctgtctcatatgaacaagcaaacaaccttgtatgaaattgtggagggtaagtgcagaatagaaaacagatgttcagtacccatctccataaagacctacatttaccccaaagctggaagcctgctgccacgtatttcactttgtgcctcatatctgtaactgtgtgcctgcggcttccccctctagaccacagatttatttgccatgtttgaatctctaaagattcctctctggtgattcattcccccccacacacatcccagccctgcagaaaactaaatctccttcacttgctactggagagggttttttttttttttttccataatcatcaataacacccactgcagagattcctgctttcagctgcatgggcagatgctggtactccctgagtctaacttgctaattgaatagagctataaattatctatgagtcacagacaccctgctgaaaaagtaaatggcatgcctgacttagtgcccttgtggtcttacttttctatattttacatgttactttttagcaagatatcatattgctgctgctctgggtttttcttgacttctcttgctccaaggttttgttgttgttgttgttgttgttgttgttgttgtttatttctcttggatttgaaaatggtgttataaagtgcaaacttctgttcaggattttttatttacaaaattactgctatagaatatacttgagcattgcaaaccctcctaaagtgatgtgtattgtctgtttcagttctttcttcattcggtttttgctgacaatttcttacagtgtgtggaaaaaagcttgctttcatggacactcaactaaaccttgcacaatgttgtcaattgtgctttcatgttctgagattattaaataaatatcagtcttgtttgaaattcaaggaaaccatctgcaaattcttcacatggggaaactgagatatagaggctgacttaaattacagtctcaagattttatagggttaaactgaaattcatggttttaagcaggcatattttcttcagttcttgtctttaaattcattacctacaataattagaggaaagattgttaaaaaataaactggggaaaaatgtcttcatcaaacttactttgtctgcacccaaactccaatcaaaattctatgttgtggatttgattacagaaattagatatctttaaaaattgtctactctttacagtttgaataaaatagtagcttatatagagaaaaaattggttatttaaccataaaatcagattgacatattataaagatctgagaacaaagccagagaaatgcatgaaatgctgtggacaaaagtgagctgaggtcacaggtaggaaggtaacaatgtgatcaactgccatgaatttaagttagattatattcctacgagtttctggagtgtattgggtgtacaaagtatgataagaaggttagggtgcatagagaaaattttcaggacctgaggacagatacaataatacctcttgaactatagatgcaaattcctagatatattatgatggttaatagtgactgttatttgatgggatttgaaatcaccatagaaacagtcatgttacaaatcagtgagggagtttctagatggggttaactgaagtgaaaagtcccactctgaatggggtcagcaccatcccactgccttatgtcttagacggaacacagggagaaagtgagagaagcttcagcataaatctctcttgctctaggactgtggacatgatgtacccaactgcttgactttcctgctgccatgacttctttgccatggggaattatgagttgaaaaatagcatttcttcttcccttaaattacaattcccaggaattttgtcataggaatgagaatactagctaataaatatagattgattctagaaacaatatgtgggatccagtgagttgctggtgattgtctcaatccaatctgcctagtcaaagctgagacttcagagtaatagtccaagatgctcccaagccaataaaatatgggccactgatcatagtgacttgttgcttataaaagccagaaaagtctacaataaagctgagcaagagttatgctatcttcagtagtgttctctaagtagatgtcatcaacaccaagttagacagagttaggaagtactaaaggttgtctgtgcaatagtgtgtaagccagagcaggaaaacctgctgacggagaccctgatgtgccctccactgggtaggaaataacttacagtgacacatcacaactgttacaataaatctttccgtagagggagaggccatcaggtggctggggactttcggtttccttttcggcttgctgtacagactgctgccatgccagctggctaggttgctctgtaagtaaggcttttccctattaaatacccttatatttctacttggctctgtattggtaatttcccactttataccacctcacaggaagctcaggtgtaaagactgtcaatagatggcttctttattagttcacagtgaccaaaccccatacaaagccaacactgtcctcatcaactaaggcaaatgagcaagagcctggcttcaactcacatgctcctctgggttctaaaggccttgggactgagacagctgaccacatgttcctttagcacagatggatagttgtctttttaaggtggttactggtggagaaatcacattctgtgcctgagtgtgtatgtgtgtgtgtgagtgtgtgtgtgtgtgtttctttgtgggcctacagaccaagttcaggatattttactttacacctggaataaacagatatgagtaaatacacaggtcgggaatcaaaacagtggcgagaatgggtaaataattactagtcacatcagaacaaagacaaaattgagaatccaatacctacatttcacagagacattttagatacaagtttagtggctgggcccccagcagcctgcacccacagcagcctgcctttaatgacttggcttcaacagcacagcttgtcagttttgttttaagataaatgccatcctgatatctatgacaagtcactgactctgtgccatacagacttaaacttctggaataaaattgacataaattgaaaaaaaactataaagaggtgtcagtgtactaagatataggaaggcagaggcagggctgtggagatgtttgagcacacacaatgaaagagtagagaccagagtccagcgtcctagcaaccatgcaaatgcttggtgggcatagtggcccacctctcctctcagcacttgatagctgaagaagtggctagtcatctgaagcaaagtgactagttagagtaaaagaattagtaagtcttgagttccacagtgtctcaacatgctagatacatcaatgccaatctctggcctacacaaacaattcactcatatgcacacatatctatattcttaaatatcctctcacacatgcaaaatgcatacatacatagatacataacatgcatgaaatatgaatggaaaattaaaggatggagcagtgcaatgccatgttttaactgaggacaagcaatcaagatttgagatcactttgagtgtttcccctactgagttctaaatcttagaattttgataagttacaattccttgaaaaactgaaggaaaattggaccttcactgctggaacaggaactagaaacattccactgttaacatccaacaatatggtgaggtttctagactctgctactgcaacttgcagaaagcctcttcattgctctgcacacaattatttctttataagaactgaacagctgcagaactgagaacagttttagtagggctgtcactgaacacctaagactgcagtgtagagccacattacaaagctgaaaattacatctcatgagattaataggcagaaataattgatgtcattctttatgctccaagtgttttacgcagttcacctcattaccgctcctggcgttcctgtattgtaagttggagggcaggttttctacctcatactcattactagaatagtggaatgagcagggagagggagtggctgtatcagagctcttgtgtaattcaggagtatggctacagagagggagtttatggcgccagatagaaacaggtctagcactgttcctaaaaatctttaaaacatgaggtattagtgggcaggtagcaccaagatacaatatatctaggctcacaattctcaagtacaaattaccagaaaacacaaccataggcaaactcatgtcagaaatgtgctattagtgcaaagctcctctgagaacaaacttccataagcttctctgaaagctgggatatgactcaagggtagggcctatgatactttatcttgattgacagtgtgttcagaaattagaattaccatggagtcagactcctgtgtttgtctccgaatatttataacagagtttatcagaaggatgacagaagactcatcccaaatgtgggcagaaatctggagcccagattaaataaaaaggtgaagacaacttggagccgcagcattcatttttcttcttcctcatccagatacacggtgcctacctatctcagagatctgccactttcatggcaagcaccttctccctggacttctttgtttttttactaatgcagttccaaccaacataaaccaatgaaatccgtctctcctccaaggcagaaggctgcaaataagtaattgctgagtactcatccccaagagacaactctgtcaccctacctccagctctgagagtatcaggcaccatgggccaaagatatttaagacctggtgccagggagagtcaaaggaacattggccaacaggcatgatgtcactgttacacatttaaaaactctcagtagctgttatgacctgtcccaggcctgtatcagatatcagcatggaccatctacaattcaccatggggtgggaaggatttcacatgcctccagctctctcaggatttgtacagttaattgtttctggaggagtgagagagactgtctgcagttgtatagccacaggtaacatgttcatgctcctgttagtaaccagaattaaacacattgcttcaccactaacaacattaacaacaaagaaagaatatgaaagttgaagcagaacactatttggagagagggaagaagacagtaggaggggagacagtagtggctctgtgatcatagtgcatcatatacttgtatgaacataccataataaaaccattgctgtatttaattaatatgccctaataaaaactcaaaaattatcatccaattaaatgtttagccatataagcagatctggcagaagagttgcccttagtcagtcatgtgtgattcagttattagggttacattttcctttcaaatgagaagttaacagaggttaaaaggaagaaaggaacaaaagcgaaacaaggagtagagaagacctggattttcattgagactttgaacctgatattctctgtgcccattttccccacagtatttagtgaatttattttggagtcttaactggttctaatgatgttaattagtgaaaatcatatactgacctgctaatgataccttatatttttataaagatacacattctgaagtcatctgcctggcctggcagcacagtgaagaacttattcataggccaattcaaatacagctattttggagtttagtaatcgaaagcactctcaaagcccagagcaaaatggagagtgttttctgttacagattgctttgtgacacattgcttttatcccacagatgctatttaaagtgacagaatcatatgaggtgattaatgaaggaaaaggcacagagcagagatagaacaaagcaaaacaatttaaaatgggtagatactcgtccttcatccaaagataggtctccagaactgaatgtcagcaacatagccaaactgagtgagataatgcaaaatactatgctatttatgataaaaagtgggcaattggtatgctttatcacaaaataataggaagtaagaaagataaataaatgttagttcccaaattttcatgtctatattctgaggtgatgcacaattgtttaatgcttttttccgtgtgtgctgaagaccatattagctacaaagataccaaaaccctttctggaaattatgtgatagaaagagaaaaataaaacttctgcctcatgattgtcaggcatacctggtcttggccccttgaaattaaaaaacaactatatatgtatatgaatatacataatcaactggcttgtaccccccccacatacatacatacatacgcacatgcaagctgaacacactgaaaactaactgttgtaagatccttctgagaactgaagtcttagagcaaactgctgcccataaaactggaaacaggaagacacaggagaacaaaattcagttggagcatgaggacatacacttgcttcaggagcattcaggcagacaagattgaaagattaaaatccaaccataatgatatcatcatcatcatcatcatcatcatcatcatcatcatcatcatcatcatcatcgtcatttgagacagggtttctctgtggctttggaggctgtagaccaggctggctagaaacctctggaaccaagaaaaggcaaaagaagtgaagtcaccaactccatgcctcccctgccagccacccagtgagtgttccagaaaaagcctttcctgctacattttgaccttagcttagtgatgctggtttttcatatctgggttttagaatttaagaaaataaactgtggccgggcgttggtggtgcatgcctttaatcccagcactcgggaggcagaggcaggcggatctctgtgagttcaaggccagtcttgtctcaagagcaagtgccagggctacacagagaaaccctgtctggaaaaaccaaaaaaaaaaaaaaaaaaaaagaaaaagaaagaaagtaaactgtgatgtggcatgaacattcttaggctttctttactgtttctcttccattccctcctgcttatgttcacactccctctccctcccttttgcatttcttcatctaacttctgttaatctcctttcctttgtaactgttaagtgaaggtggcatgctgatgacttctgtatccctggcaaacaccatgcaatttccttttggaattacttctcttctccctttggactaaatgacatttaagaattacttttttcctttgggtttttttgagacagggtttctctgtgaagctttgtaacctatcctggcacttgctctgcagaccaggctgaccttgaactcacagaaacccacctgcctctgcttcctgagtgctgggattaaaggcatgtgccactaccacctggctaaaaattacagtattttaaaacattgcaagcaaaaacaaacaaacctatttgtcacttgtgacacactacacattctcccccatgttattaatgtcaacatttctcaattattcaatccaaaagtcttgtcatcttctctgaactcattctctcacatccctcatccatcccattagctgtgtcatcaactcttcctcttgcttttatatgattccttccttgacttctctacactttaatgcctttcctcattctgcagcccaggtgactgcaatagctgaagccaccacatggctgttgccacacatgagtgtcctcacagtgatggacatacctcacctatctggtctcccctctggttttcagggggaagctatgtgtacaaatttctttatatcatttacagtaaacaagtcctccaacttcttatttaacaaagggactacagaaggatatgctgcctatggggtctgaagagagggctcagtgtttaaaagcattggctgttcttccagaatgcctattctagattcccagcaaccacctgggtgcttacagctgtctgcaatttcaattccagaaaatctgctcctttttctgactcccatgggcactaagcatgtgtgtagtacacatactacgagcaggaataacactcaaatgcatatacaaaataaaataaaataaaataggattgtactgctgagattatatctttgttcataggtgtattgcacactctcttaccttcaccagtcttagttcaaatacccattttctcagtgaggtcttttattatttcttaataacttgtaatatcactctgtctactttttccaatggctcttatcaatgttgcacatgttctttatttacatctgtattactattcccaaggatataagcatcactgggctacaggtttatctattctacttactgttaaatcttgggtgtaagaacagctatgaatttgttacctaaatttagtcatatttaaatatatgcactttctctgcaaaacagttaggtcactaacataatggacgtatgatcagagtgggacccttatagagaaatttcatattttgcagtaactatatttcattcttttaaaaaatctactattcactttttactcaagtagtatccattcactgttcactttgaacaaagtcctctgggaggcatcagcagccacacatggaagaacaaggctcaatttagaaatttaagtattattcttgaaacagaaatgaagaaaaacacaaaattaaaatgacatgaaagactgaggccaggaccacaatggaaacaaaggtgtaaagcattatagaggattattttactcactcattgaactattgaaaaagtagcactgggtattcttcctctataagtgaagaaccaatcaggaaattcagggttacaatagctgcccattccttcccagggcctctcacaagcaaagtgttggctatggttagcaccggggatatttttggcctgtccatggttttcacccatataagacatgcagatcccttcacattttgccatggtgtagatttctctattctcaatagaaatgcatgttgtgtcaaaccctgacaaccagatcattctgctgtgtgtctaagagcaatgtcttccaaacaaattagatcacttccatgtattttctgatatcttcctaagatacatagagcatggttgcatcataaatttattttttcttagactcactaggacccaaaataatactgctatcttaggcctctcctaagtattcatcttcaagtcacaaaatttgttcaagaataaggagtagttgaacatgaccagtctatcaattttattcaaagaaacacacatccgaagaactgcaagaagcagtattttatttagatataagattctgaataagtactattgagtctctcagtactgaaagcataatgtaatatggtttatatagatttcacttacagtttttatgccccaaactagaatacactgaacatcacataaactatatggataacaggaaagcatgcattcattaagttaatagtgagaatctataattgctacagatgcaaatcagttagatgaaatggctgcactacagtcatatagaaaattaattccaacagtgataatcattattatctgtaatccatcatcaggagagaagcaaattggaatattaaccaaaacctctgcacatactaaagttcaaagcttcctcatgttcaccccattaccctagctcacccttaatgtgctgcatgtccctgagagaaggcagtaatcgtcacaactccaattatcaggtaagcacacaaagcaagaaaatattatctcgcaatgggatgtcatctgcaaattggattaggttgggaacctggctaagagagacatcttgcctcatctttgagatttgtttatttatttattttgtcatctcaagctactcataaaacttccttgggcttttagtttcccatttggaaatggaataactatgactctgttgcccactttaatacaacacacacttggattctttgtttatatgataataaaagtgttataatgcaaaatacttcatagcatcattctaaacttggctactatttgctgtattttcacattatttagtgtaagttgaacattgtcttctgcacaaatcaagctagccaatagtccctgccatataagcacattcaaaatgtcagaggcttaatagcttgtcattaccatggatacatattagtcaccataaatacatcttactcatcttgacatttagtgagttaattactaatttttctctaatcgtccttgtggagatgcccacatatgtctgtagacttcacatatgactcttgtgagcccactgggccttgggctcaagtgacaactttgatcacaagcattcaacacaggcaaagaaaggttcatcctttagtgctgcctggtagcagtttacattacatactcccctctcacatttcattctccattgcttcttttacccatcaatctcttatgtccttctagtttcccaccagggcagcactctggggttacttctgtcactctacaatgaatccagggcttcgatttcctgtctgttgtactgttcgtaacagaataagactttataagtctttttaaatcttttattgtatctctgtgtctgtctgtctgtctgtctgtctgtctgtctgtctctctctctctctctctctctctctctctctgtgtgtgtgtgtgtgtgtgtgtgtgtgtgtgtgtgtgtgtgtaatgtcagtgttgtgacacagcaagtatatggagttcagaggacaatttttcaatcatgtgtctctactgtatgaactccagagagttaactcaggttatcagtgctggaagtaggcaccttaaccaactaagctatctggcctccccagccttaagattttttcgcttaagcagaaaacttggtgtaaatttattgtcacaggtaaatgaatattgaatagtatacaagtgaaaattattcccagttatttattccaacactcttgattttattttttcttgctttcttatgatcaggaatttgtttttatagcccaagtttaatttagttttaacaatggagctacatcaacttcctctgaatagaataaaggatgtttgcttctgtttggggaagaaaaaatccatgtgtcaactaagtttgtcaagttcctgagtgagctatatgaggggtatatggtaagccttaagaaaactctaattttttacagaatgttctcaatatcaaatccagtacctgagagacgtgaaaggagatgtgatgcttatattcagcagatctctgccataaaatcaaacgtccaatgggactggctcagataatgagatctgcagtgtcaacgttttgatgataagcgtgagaatattagaatcacaaatcccagaaactctgcaccctgacagcagcaggccctgacagttcccttgaaactttgttcttgctagagcctgtaacaaaaacagaagctgatgcttaaagaaaaacatgtatgtgcttttcaaaaccaacatctgccatccatcattcttgtcaggctaatcctagtctgaagcccagaacaccccaagcaaataagtacaggctcttttcataaaggaaataatatgcacaaattctgacaaaatgaagaactttttaacacaaacttgagatggttgaagcacatgaaaagtagaaatggatgtactggacttggaccaggcaggagtagttgagcacaggggactatcaacatggagctctactttgatatcaacaatgccacctgcaatcaagatgagagtcaattagaaagagtcctagaaatatttacatacaattatatacagccaatgaaatggagattttttgtgtagtgctacaaaaggaatagaaaaaaataaaagaggaaatacaagatttattttctgtattaaaatgaagaatgtactctgccattccaataggctttacttagtaggctcaagagccttgtgagttccagtttcaagagttgctagattttcaggtcttgtctgttctctttgacaggtgataggggctgttgctttgattgaagacaaggcaagtgccttctaagacagtttgtgtctctcaatatctgcaagcttgtctcctactagctactgttaaatagagttaccatgcactgttatccaactgtctaaatcctgcaagactggacacataagagcacaggctataagaagtgaatttgagccgggcgttggtggtgcatgcctttaatcccagcactcaggaggcaaaggctggcagatttctgtgagtttgagaccagcctggtctacaagagctagttccaggacaggtgaatttgttatgtccaaaatgaaaacaaagggcaacaaagcccagtgtcctggaaagttgttcctctaaggttcaataacactctcagtggtggattgagtcactagttcttctgcctcattgctcctaattcaagtgacctgcaaagaaagcattgcatccagttaatgtcaaataggtaatgttggctaaagtggagaagaaacttcaaagaagagaaaaggaacagaattctggctgttctcatttccatttcacagtctcagaatgttatattctagtttatttaacagtttttcctaaggactacaaataagaaacataatggttctggtccaacaccacatagagaaccgtccatcactcagtagatagcaaatacagtaaaatgtagctatgccacaaagggaaggtattgaacctactaagtgaggagagtatttgcagtcctcaaaagcactctgcttatacttagtacacaactgtaagaaatagagtctgcctacaatctagcccaagagtctagataaagagagataaatgacaaaagaggtagggagaaatatttgtataggtattacctcatgttgagtgctttggatcccctgtttatcttttgaataacttatagaggtgttggaatgggcatggctatcatgatttagaaactaaaatctcactaagcataaaggggtgataacaaaggcccagagaatcatgactagacaaaaccgtggacagtactccctgagatggctgaaaattctttgttttaatttttttttcagtgagcaaagtggcaaagagtgtctaaggacagcaccaatacctggactgctacagtccagccttggtttttcctagttgtcatctctgtctctgtatattccccctatatttcattggctactttgtatgtgaaccacatggtgtcaaacctattgtattcctagatggattcttggtttttaaaagatattttgcatattgactgatggtttcatatatgtatatagtatagtgttatcagattccaccccattatctcctacttccagtgaattgctcctacccaatgaatcccccctgtttatcatgtctttttgtttttaattttgtaatccacttagtttaattaaaattacctgcatgagcacagtttgggaattatttaccggaccaactacaccacagaagaaaatggctcacccacagcaaccattaattgacagttgctcttaaaaaaggtggtgaagcatcaagagtccctcccatagccattatggagtggttgctggcctaaccttgtgcagggcttgagtgtgttacctcagcttctttgggttcacaagtgcagggttcttgccctcttaattcttctacttcctatcttgctctgatcatatatataccattattcctgtataaccactaaacctaccctggttaaacctgccatagttaaaaacttttaaatgtaaggtgtaattatgtccccttaacctagtaacatatgctaaaagtgggtacttcataaacaattgttagaataaacttgtcacaatatcaattccacctggccattatgccttcatatacttatagcaaacacaaacatctaaggtagttttctacccattaagagaataaaactaagctgttctagtcatagatctttgtgttattggactttggcatctgaaacaaactattaataataccaattcctgttttttataattttttatttgaattagaaagattattttacatgtcaatcccagttccctctccctctcctcctccctcccctcaactaacaccctacctatcccatatcctttctgctccccagatagggtgaggctttctgtagggggtcttcagagtctgtcatgtcctttgggatagggcctaggcccacccccttttatctaggctcagggagtatccctccatgtgggataggctcccaaagtccattcctaatatggataacaggaaagcatgcattcattaagttaatagtgagaatctataattgctacagatgcaaatcagttagatgacagggaatctggatcaatcccattttggtttcccagctatcagtctgggtccatgagctccttcttgttcaggtcagctgtttctgtgagttttactagcctggtgtggatccctttgctcattagtcctctgtcccgcacgctctgtatttctcgccagcaagaaatcacacgcaggacactcggatccttctgcagacaagctttaatgcatcttgagagtgaaagagcataagcttcccagagcggagacttagcggagacattgaaccaagaaaaccatcccttataaaggctgaccagccgcctgggacgtgttaccctatgaatggctttagctcctcaggccaaaatgagccacgggataggcagagatcaaaggaatggaaattacccagcgcctgtgaagtaatttacatcttggtgtcttcaggcaccattataatgcaggaaacggccccttacagtcctccttccctgcaactggattccagtttagttcaaggtttagttgtgggtatctgtttctacttctatcagctactgatatgccaaccaattcctaattttaacttctaagttacctttgtgcttaatccaatgcatgtattttcatctatatacacattctttgtatgttcaattttctttgatttttgtgatatagaatgacttttcattttacttctataaccaatatctcattcacttaggaatatctatatctatctatctatctatctatctatctatctatctgtctatctatcccttttattactctcatttcctgttcttgctgtcttgggactatgctgctgaggtaacttgctgcatcagccttaataccatgttattccctgaaaccccaacaaaccaggtgaaagatgttctcacttatccactttttctctttttcactatatactgggcatatttgtctgataatcatgtgactttgcaattctaatattcagtgtagatgtaatcagttacacaacttattaaacacagcattaaatttaaaaaaatattcaagagttacatttttcttgaaacaatgttggcatgagactgtttgcaacatgttcacaaagatatgccatgtaagataaacattcctgagtacttatccttaaaaataaggaacaatttggcagctccacacataactattcactttcagtacaatctcatctgggcctctctttctacaacctgtgtcaatccaatgacattttaaaaatcataagaaataaataatttgttaagttgtggaacctagtaacagtcattgttttgtgtggaagattcactattttcaaatgaatttacctgtttcttaaggtagattgttaactttcatagatgtcatccatcaaccatttaaatcagttggtggatgttctacatgtcagcttataacaatgtatacttgggaaaggtacacctttagtgttatttatatgtttgactcatgcttacaaaggtttccaataagccttctcctaatatatcttacttgtggatgcttgctcatatgtttttgtacatacaagtgcatacatacacacaaatcaacaaaatctatttctctagttgattatatgtacctatttgaatatcatagatataaaatgcactgcttttcatgtgtgttcttgattttatctgaaaagaaaaatctttgcttctgatagatctaaatattacaaattattccaggattatttatgtcagctgaagcaacattcattgtatctatcaggtgatttcaaaaacttaaactaaccatgtaatattaggagcatgagaattctatcatctttaaaatactacatctaaactttgcttcctactttcttggcaagttattttcagatattcagcctcagttgggctattatgagaggagactgaaagacttgtgtgccataaaaacatttttcccagatgtgtcctgatttaccaaaatgtaacatacaactttggaaaaatgtgatagactaatgtgcaaactgctgaatccttacccacacaatttttaaagagtcggttgctacttattattagcatagatgtgtatagttatgggtgaaaaaatgctgctgtacatggaggagataattcatataatgaaattaaagatattttcaattaataggaaatgatttgataacaatattagaagtcagtattatacttatgcagccttgttataaaaggtaattcaacaagcaaacaaataaagatgagagactgaaatgaaaaagcttttccagtacgaaaaaagttaatactgcaccaccaccattttagctgtctacaaacaaataaatttattctacttaaacctttaaagagaaaggataaataattcagtccttcattaatcatcagcaatttcaccaagtacacaaagtatgagacgcaatctgagaaaacacatgggtaaaaagacagatcacaaatgaaacataatttcattgcctttaaatgtaatacacttagtgaagacagcaatggagacattgcagagtcttgaagctaagccatctgcctcttgagttaatgtatctattacaaggtcaccaacctgtactgtttaagtactctgaatgtaaggagcacactgtctcatagaagtgtttttgaaactgtcctaatatgttttgaagtggaatcaagtaggacaaaacagtagcagctaggagacattcttccttgatacaagccagcactctgtattccatccatcatctcttatgacagactcaaagccgatcactgagagaaatgctgtgattactttattaatttcacaaaggagatatctaagccacccagaggttaagaaatagcaggatcttagatattactggacaaagtcagacttttgagtttgtgctcttagattattcaagactgtcctttccagagtacagctggctgatgtagttaataaatatgttattttggactggtaaatgccaatagggcatggcaactcatctgcattcccactttaacaaaagcagtgatggagacacacagagaacatgcaggctagattagccacaatcagtgaacaaagaggttcagagagataacttattgtctgaacacaatccaagaatggagtcatgtgagcagaattttgagtgttgtgggtaaactttgagaaaacaaaacacgactcttgtgactttggtgtcttcaaatacacagaactgttcttggaatgagtttttgtgcacacctccctgatgtagaggataggagtgagtttacttcaaactgttctccagactactatacaaccagttagtattatttgtttaaatgcctgtacacgaaaatggctctgctacatgtagcttctctgacatgcctcatcttccagaatttccctacttgtgcctgcactgcttacatctgtgccccattggttccactgcctttccctcccctccctgtgtcacatgtccatgtgcctctcttccaacactacacaccttcactgtacagataaccaaggggacaaacacagagcattctccaatctcaacatcttttaacacctacatagagtattgctcagacctatcacatttatggacttcagaaatgagttcacttagcttttgaatatctgattttccttgagcctttcacatgaaatagagagttaattagtttaaacaacaacaaaaaagatttatactgtagtggtatgtcttttgtgattgaaaatattaatgtcattttcatgattgttttaatggaggaaatttaagtgaggaaagaaaagacagctatggcaaagaatagaacttggatgattctgaaaagcatgcatgatgaaatcacttgagtgttttagagcctggaatacattgtcagaagaatacaaaaaaatgtatgaaagaattctagagttataagattggatacagtgcaacccattcaaaactcaccagctctatatatagtgggatagctaaataaatcatgaaaaaaacaataggctatggtaatgaaagcaatctctcccagacagactgctgagtcaggcactataacacacagagtcatctctgggaatctgacacacagtaccaaatttagccagaactcccccacccccaacctccagaccctacctctctaccctcctttcaaactaagcttcaggtttcacatgggaagaacagcaatggagcatttcaatgttcctgaagcatagtagggaccaatggcttgacttttcctttttctttgtttggtttttgttttgttaagaaagggtttctctgtggctttggaggctgtcctggaactagctcttgtagaccaggctggtctcaaattcacagagatctgcctcccaagtgatgggataagtgcatgtgccaccaagacccagccaaatggcttgacttttcttggatgggtttgttgtttctgtagatagttgtgatatgacagtgagtaggcaagtgatgctaccttcctcatgaaaccttgtgttaaagcataaggccaatcctcagtagtagagtaaggagaagtaatattccagaacctgatttgagatatcagacagaaaactaaaggaaacaggaaatcaagactgttgctgctgctgcccagaatccctggccaatcacctttggaatgtaatcaggacatcacacagtacatagaaaagaaataaagatagcagccagattgtagtttgcctgaagatcaaagtgcaaaactagccacaatatccagccatacagccaagacagtagtggtacatacctttaaagccaggactcaggagagagagggagatggatccctgtgagtgcaaggctaccctgggctacatgagagtgaattactctaaaagaaaaacagagctctcacattaatccccacattagggagatggagacaggagtgatatggctgggcagagaaagaaatataaggcaagaggagacaggaactcattatagtctaggcagtgtgaggagcaatgcagtttggagatgcaatcagaggacagaattaccacaacattgatagaggtaagaactctctaatgtttggcttctttgcttttatggtcttcaggcaagccttatttgttagatcataaacaaaatatcactacaccagatagcttaacacacattagaagcagcatgccacccaccttctctttcattccataaggttaggcaagcatatatcacaaatacagagaactgctttgtcttgttgtgcctaaattttcttagcaatgggtccatggctatgtctttgaagacctctctactggctgtggtcttcttccttcttggatctgtgtttgctcttggttcacagagtaacaaagtttgtaggtccacagttttcccagttcataaaattgggtacccagagggtagattagcaaagcaacaaagaagtattttaggtctattaacaactcaatagcatcatgacactacagttaatcgatagaatgtagtctactgtttttaaattaaactatgttgccttcagctgaagaatccagtagagctttttgtggccagggcataattgaactttgtctgcttctcaggattttctgtccagagttacctaacaatttactctccaagcagattggtctcaagttaatttcccctaactaagggatgccaatcagatctaaaacctgtaattcccaaaacaagatctgcactgggaaatctggggcatgaagttcttaaaggacagaacaatacaagccagcaagagtccttggctcagtgctctctgagccagtaagcagttggctccatttaaataagctaaaaatagactaaccagcagttaaaattttcagcacagcaaaaagcaggtaggaccaggcttctctttgatctccaaggtttgcttcattgcgtctgataatggtgcatgacgtgaagaatgtcagcgatactgtggtctcgcattacccgagccgaacttggtcatcagtgtaatttatctaagggcagcttactgctgaataaagagctcggcttcaagtcttccagcctacacagcaggactttctagaaattgtactgctggcaaggaaactcttatttatggaaccagggaagctcattagcgatttttttttctgggtaggcttgcatgcaggacactctttatttctttatgtggtattgcagggttagtcttgatcacaggaatcgggaaagcatgcagaatcaagcatggtttatcagtctaagaaggaaagcaaaccaggataagcattaaagtacatttatttgccccggaggcaaacacaagttagcttcccttttcaaataggatggagaatacaatgttgctttcatttagctgaatcaggaacctaactcccaactgcttaaatttcaacctgtgggtcacaaccccttcaggggtcaaacgaccatttcctaggtgtcacacactagatgttctgcacatcagacatttacattataattcataactaacaaaattacagtcaggaagtggcaacaaaaataattttctggttgggggtcaccacagaatcccagcattaggaatattgagaactactggcttagatctctacatctgatagtgttggtttataaattccaaagaacattaaaaaatgtctaatatataaaataaatatcattactctccctaaatatttttatcatagttacacatctttaaattatattattcaattactgtctttttctcttcccaagactttgcaacttagataatcaatggactacttcaccaaatcatctttgagttctatcatccagtgttgacctatcctttgaaatctttaaggaaaaagaactattttcattcttgtcatttatgttcaacaaaaattcccaacaataagcagtattacaatctattatgtatcttttaaagactacaaaggctagaggtaaaataacattccaattaggtgaaatggtcttctgttcagtcaccagagcatttttatttgtgcaatcctattacaaacaaatgaaaaaggaaacaaaaacataggcaatgtaaatggatttttctttgggccaccagctcacaaaaacatggagacttattattaattatgaaagcatatggctttggctcatcccactcgctcttataactgaagttaacacatttctattcatttgcatatttccatgtgactcgtggcttttacctctccacctacatgtcttgctctttctctctggatctagatggtgactctgtctctcttcttcccagagtcctctctctgtccagaaggccctgttacaccacctgcctagatattggccatttagatttttactaaaccaatcacagtgacacattttcacacggtgtaaaggaatattccacaacagtttgaggttaaaaaattccaatcattccttcctccagaaaaaaaaaaaaatacaaacaaatcggacttttcctcctgtcctttggtacttgtctgcttatagattcctataaatctacaaaactctattgatggttgtctttatatttatggcagcttcaggtccaatcttgaatgctgtagtcattctcaagtgtcctctgactggcacatatttccatgattaatgattgttttagcagcctccttcttatttgttataaaacataatgttatgttatacttcatcttctttttttaccactcttgagtctcatgtctacaatttaaactaacaaataatcagaaggatattttctcagagtgtccccaaggtctatgctaaactccactcaacttccaatgggattctcagaaatgatgcccagcatcctgtgccctgcctctaaccataacttctcagacttcaccatctgtctctagcctgttttcctgtcttctccttacagaaatcactcattgcttagactgtagactacagaccttgttttcaaattctagatttagcaaaacattctaattaatattccacttatggacctgttctgttattggtgtacatttgatagacacttatacaaatcaacatggtgatgccttgagatggctcagcagctaagtttgcctactgaggtcaagccctgaaacttacatgtaggaaagagaaccaattctttcaaggtgtcctctcaccttgacacatgtatgcagtgacacacatgtgtccatacatgaatacatactttcacataaacaccctatatgggggcacacaaaaaattaagtaaaatgtaatacaaattttaaaaagaataaacatgatgatcttagttttatacttacacaaaaaagtatgtatactatctacaacctccattatataattgactttttttaaagaaaaaaatgtgtctggaagcagaccattttaaaggttattcgggttctggagagatggttcagaaattaggaacaactgtaccaccttcagatatctcaagttcaattttctccctcaattaagtgacacataaccacaggtaacaccagcaccagagaatccaacacctctcctggcttccttggcacctgcacacaggtagcatacatacaggcacacagggaataaatcagtaaatggggaaaaggcttattgtaattgtgtatgccctttctaaaatctaggtgttgccatgacagttcaaatgtattgtagtatattacaaggtatgaggtgtgtgagacatttcatcactggtttaaaaggaggaaatttttatttaagctcattttggagggtgcagtccatgatgggttgactccattctgaagccagggattacatgacagtgaggtgatcataccctgaggctgcctccaccattattggtctcaagatgctcatgaaggaggcttactgctgtgctcctccggcttgcactgtatcttcccaccatgtaattctgtactactcctcctctccagtgtgtatagtctccacaatgcatctcagtctgccagctccttgatcttgtacttcccaggtttcatagttgggattaaataaatttaatagttctaagctggtaagcctcagatattttcttccttccttccttccttccttccttccttccttccttccttcctttctttcttttttatttgaattagagacaagattgttttacatgtcaatcccagttccctcttgctcccttctcccctactaccccaactaaaactcaacctatcacatatcctttctgctccccagggagggtgaggccttccataaggtgtcatcagagacgatcatatcctttgggttaaggcccaggcctaccccatgtgtcttagctcagggagtatgtggagtattccctctatgtggaataggctcccaaaatccactcctatgttagggataagttctgaactactacaggaggtcccatatatttctggggtctcctcactgaaacctatgttcctgggatctggatcagtcccatgctggtatcccagctatcagtgtggggaccaagagctccccattgttcaggtcagctgtttctgtgggtttcaccagcctggtctggacctctttgctcttcactcgtttttctctgcaactggattccagttcagtgcagtgattagctgtgggtatctgcttctacttccacaaggtgctggatgaaggctataggatggcatataagttagtcatcaatctcattatcagggagggcatttaaggtagcctctcctctgttgcttagattgttagctggtgtcatctttgtagatctccagacatttccctagtgccagatttctctgtaaatctaaaatgtctccctctattatggtatttcgtttcttgttttcttctattttcttataatatcaaaacaaatagattaagacacatatgaagaaaatcatttaacagactcttttgagttttcaaaaggcaaatatatcagctagtcccttagtcttcaaaggatgtatacatgccattcaacagatgcaatttaatattagtaggaattatgtgaagtctagagataaacaaaaaaagtctgctcttatttttagagttaaaaaaaagaaaaaaaaatctgacaatgttcatgggtaagacccagagtttttcactgtttgctcactcttccacatgctgggactgtcaccaacctttattttgttttgttttacatgtggtgtgtatatgtgttcctcaatatgccagggaatacttgtggtagaggaaaactttaagtagttgattctatgcttgaaccatttgatccccaaggactgaactcatgtcttccagattggcaggaagagtttttaaccactgagcctgcccccttgccctcccagattttaaaataagcaatcattcaagcggccaacaatatcattccttttggcacaacatcattttgatccatagaaaaaaatcatggtgttattgttctacatatgtaaatatattcagtcacaaatgtagccattaatgttcctgaaccttattttctttttttgtttatttggttttttgagacagggtttctatagtgggaaattaccaatacggagtcaggtagaaatataagggtatttaatagggaaaagccttacttacatagcgacctagccagcccgcacggcagcagtctgtccagcaagtaccaaagggaaacgaaagagaaaatgcagtcactctacctcaccctgaccatgccctcgaaaccgtggtcaggcacacctgtagccaggccctaagtaagcgtggctacagcttcccctacaggtttctctgtgtagctttggaagctgtcctggcacttgctctggagaccaggctgaccttgaactcacagagatccccctgcctctgcctccctagtgctgggattaaaggagtgtgccaccaacgcccggcctgaaccttattttcaatgccccaaagcccaatttccctattcaatagtgcccaccatgtcctcattgcttccctgaagcagtatatgtcaatgtgatatcttttaatccatcaaatggctatacctggggtaactgcaaagtcaaacttgatgtctctatagctcagagaagaggctttgagggctttttataatgtgatagcataaaatgaagtatctctaaagtgcccttctgctttcctctttgctaatttcggaataaaatatctcaacaccataaggggttggagaataagcattaaaacagacattcaaaaaatgtgcttagaaggatgggactgtgttaacagtaaagaggaccagagaggtggagcttagtacccagtcctcgctagatctgatctctttggagacagaagctactgggaaggtcaagctcaataccaagtccttgtggcagacctgtgctgctttggagacagaagctttcatattcccagcaaatggaagacagggctcagtctgtgggtcatgaagagaagctgaccatcttttagaaatgctgtcagcctgtcacagtcagccttctgtgtgaccacgcccaactacttccagaagacaccaaatactaataatccctcccactctgactagagctaacagaatttacgttgtcagtgttttaaccttcaatactgtgttgaaatagatctcataaggttacataactcatacaaaaatacatttaaattggagttcaaatcaatgccggtagctgtttgcttttttacaacagtaacatcttagaacacataactacacggtttaactcaacttggcaattaaggagaccatgctatgcactccacatgcaaaaatccttttaaagtaaagcagatgatgagaacatactgacagaggtatcaatgtccagctaggtagcttgcctgtgagaaagagtaaaagcattgtagaaacaaaaggattagggcagagcactctagggctgtttgatgcatttagagtgtgcaaaatcagagggcacagactgctataccttatgctaagtcatgaagacaggaagcactccaccaagcaggggctttagacaataaggaatggaaaaacattttgaaagtgcattttaaggggaacagtattatgttaaagtaaagcaggtttcttggaatctcacatatgattatcctttgtctttaatgtgacacacttacaattgttactgaatatcaatgagggcataggttttttttattttgttttgtttgtagctaaatgttatttttaaacagcctaggaatgatgatgtttatcttcataattgttctgtgaagtcaaacatgtgtgtatgcatgtgtgtatgtgtgtatatatgtgcatatatgcaagtgtatatatatgtatatattggtatgcatgtgcatttttgttcatgtagtatgtgcatgcatgtgtgagtatataagtatatgtaaatatatatgtatatgagctttgtacatatatgtgtctgtgaatgtatgcatgtatgtgtgtgtactgtacatatgtatgtatatatgtgtgtgtgtataaaggtatgaatgtgtatatactcttgtaccttaaaataaatgctattctacattctcaaaatatccgttgtagctacaagatattatggaagaaaatgcaagtcaaaatattttttttttctgttcaacatgctatgattttcatatctaattaggatgtctttacattacatagacaattacaaagcagaacaagagtagctggggaattttaaagacttaaaatacagatggaactgccattcacaagaaacatacgcagatttgctttgttctgttttgttttcagattattttattgggcttgaaatgactctttataataggacaccctttcttgatgagaaaacactcaagggagaagaatatttttttgtatggttttccaagacagggttttggaaggtattgttttggaggctatcctggaactcactctataaatcaggctggcctcgtactcacagagatcttcctgcatctgcctcccaagtgctgggatcaaaggcacttgccaacaacaccctaccaagaagaatatttctttaagttgccattggtaacctctttagagctacttgattgacagctggtagaggcacttagaggaagacaaggtctggaagcatcctaccacacaggggcaacatcaaatcctctcattagcctggtattggacacaactaatttcacacttcaaacagtatttatttcatttgtttggcttaggttaagagtctttctttcttgttttgtatcctccaagattctgtataccaagtaggatacaagcctgtgaatgcttaaggatacaagcataagaatgcagtgggagccatggcttttttcttttacattccatggtcattatttccctaaatactcaatgaatatacttgtttggagctacaatcaaatattaagtaagtgttctccatttttactttccacttctatttggagatacatttatagaattattttttaaacagcaatatagaaatacaagaaatagcacagtttcaagaatcaagcccagggtcagctaactcccttgatctgggcctgaagtgaatcagcccctcgttgtgatgagaacctatgtcagaaaagcttcaaaaccagagccttgaaccagagtgagagacagaagtgaccagggcaaggcaaacttcaaagaccctactgacctaattcatccaacttcccatagttccaccttctctaaaaaaaccttttcaaaacaaagaatatatcattttttaaatcattattttcaggattcagttgctcccataatgtccttcacattcaaaccaaaacaaagtctacaatgaactgtagttccttaactattttccctcctcttagtccctgatccaaaataaattcactctgtatttcaacttatcagtctctcattggattttcttcttgtgttccaaatcatcaccgccacaggctagccgagaattggacctctatttggaaagggttaggggttacagtttgagttaaggttagggtcaacctcccatttctcttgctggatgatgcaactatctcttactcatcatcttatgagaaagccatcaaagtggtaccaatttgcaatgttgaagaaaaaattgcattgtgccagacacaggatggattaagatcatgggcttataccattggtccacagttgatggttggcctaaaagcatcaatatttgcctatgttatgaaccctagcaagacatgttctgatcatcccagtgactcagactaatggcattcatagtgggtgtaggagcactgtttcttctccgcatagtttgcccatcaattctggaataatctactagatttgtgccctttctcagacaacattctagaaatgatggtgactctccaaggactctcaagacagaggcttcaatttctcatctgtatcctctgtaccctccaatggattcaaagaagttactttccagctgtttggcacatgagaccaggcttcattcccaagttctcctctctcttaccttcccacctttggcagacacaaggcagggaagtacacaattccaaagatgtttgaaattctgatattgttatctaaagatttcaacagaggcctggatggaagcatgccactagaattatcttattaaaaacttaataatgaataaaacaacacaaaataagtcacataattgttctaaattctatcagagtcttgacacaatagcaagtgtgataatcatctgtgaaatgcagaagtcacttaaactgatattcatagagtcatggtgagtccaggtttagatggtgggctaaagtgttgtaacagaaacaccaatgtcatcccattcagagaggttctgacacaattgtcaatatcgttaccctctgctaaagcaggaaactataacaccaccagggacagacttgcatcagcacaagaaatgatatccttcacacaaagaaataaaacttgcacgtcacaaaagataaacatctcctttcctatatatcatttatccattcactgaaacagacacatacctatgacttgaaccaatgaattttgtcccacctaggaaattaaattatttgtataaccaggggtctgatcaaagcattattctgtttaccaaatagccttatttaatttctatatgaaacataaaattgcctattgtctttccagtatagacagaaaaagatgtgtatttctttaaattcatgtcctgttctcatatagaaacaatcccaatttctcagtctcaatcccagaaatttcataattgtacactaaattggcatctcgaagcttttgttttagtattttagtacacctataccacatattatatataatgatagattttcaagaatttattcacttttaaaattaggatagcaaatgttcccagtttataaaaccataatgatgcttacacacaaaataacaaggttgttttgcacaagccacagaagcagttttgtctcttgttatttggggaagaaaagaaaaccccatctcaatatcatttttggattaagaggttatagatattttgatccctttgatcaaaattctgtttaaactgctctttttctagctcgtgtcctattaggcacttcctagaccattgaatatccaccatttggcatttccctttgggattcctgagactcagagtcctcctgtgttgaattatgtgacacccactttcttaatttattttagttggacatatgagaaattaagtattggattacagaattggtatatggggaaaggcagtgggacagagagagtgttaccctggaggaagagtacataaaaaaaactctatggaaacctatctaataatcccactaagcttgaaactggaaaggatagttagtaaagcccatgtgatgtagacatggaagagggagctaatttctttttgtcttcctttcttttcttttttctttttaatcagtggacaatgctactgccattaaatagtagcttgtggtgatttgaaagaagatggtacacatagggagtggtactattaggagatgtggctttactggagtaggtgtggtcttgtggaggaaatgtgtcactgtggggtgtgggctacacccagtctggtacagagttgattatgctgcctgtgaatcaagatgtagaactttcagctccttcttcagcaccaagtctttttttctagatttttttattcatctttttaaaaatttatttagataccaaccacacttttctctccttccattcccttttccccaacagccttctactgaacacccctccactcatcctctgtctgtccatagtctgagttcccacaagctcagctcagatgtctctgtggttttccccgccataaccttgtcaccccaccacatataatccttccactctttattcaactggactcccagagcttggcccaatgcttggttgtgggtctcttcatctgcttccgtcagttattggataaagtctcaatgatgtcaattaggttagtcaccaatctgaaaagaggagaaagccagttgaggcaccctgtccactaatgctaggactcttagctgggggtcacccttgtgggttcttgggagtttccctggtacaatgtttctccctagccccataatggccccttctatcaaaatatctctttattactatcctcctccatctcacccacaactcgaccacactgatccttcatgttcccatcccccattccctatcccttcccccgtacaacctctctgaccccagtttaccaaggacatctgacctattccctcttcccagggagattcatgtttccctcttagggtcctccttgtttcctagtttctctggggctgaagattgtagccttcttatcttttgctttacattaatatctactcatgagtgagtacatactgtatttgttttcctgggtctgagtcacctcagaatttttttctagttccattcatttgcatggaaatttcatgaagtcattttttttccacttagtaacactccattttgtagatatagcacattttctttatccattctgcaattgagtggcatctaggttgtttccaggttttggctattatgaataatgctgctatgaacatagttgaccaagtctttatacactgccatgtttactaccatggtgataatggactaaacctctgaaactcctaagccagccccatttaaaggttttcttttacaaaaagccccaggccatggtgtctcttcacagcaatagaacactatgacagagatatgaaaaaaaaaaatcacagagataggcactcatacctctctacagtcctgcagctgccagatgttaaatggtgggctggtttcctaacaaactagaggagaaatcctgatctattgttaaccaaaatgaaaaacaaacaaaaacaacctcttggcatatgaagaacattttgatatattctgtctgtttttcttcactgatgtttcatgctgttttgcaaaagaaactggtatctcagtctctaagcactacatccccaggctttacaattggtgtgcacatcaacaagttgagagagttcctctgtctctggtatgctgaattgtcattgtcccacatgggaacacctaaacatagaccagggcttatggataacaccagcaatagacaagcattaacctagcaccaaaggctatcttgagacatttattgtggtattctcttgtattgaaaggaggacctccacagggaatcatcaaagtctttcacatcatttgggggagggcctaggtcctatttcttgtatctggggtgcaatagtaccccctccatagggaatgggctcccaaagtccatttgtgctctaggcataaacactggctccactgttagagggcccatagactgtcttggtgtcctgtcacccacattcagagggcttggtttagtccaatgcttgttctccagcttcaggactagggtctctgggctctcactaggtcaggtcaattgtttctgtgggtttctccagcacagtcttggctcctttgctcatccatcctccctctctgcaactgggaacccttcactatccttggggagtgggtgggagtgttttgggtaggtcagtaggaacattggagaatgggaggacgagggaaaggggggattgatatgtaaataagagtgcttctaaaacaaaaaaaaattaaattaaaaaaaggtgttcctgtggtgatattttcatgatctaacaaataaagtttgcctgaagattagactgcaaagctagtcacagccatagctttccggcagtggtagtatgcacctttaatcccagacaggggcagatggatctctgtgagttcaaggtcaccctgagctataagaaattgctccagtctaaaagagaaacagaactcacacaaagttgatctcagtgtttgggatcccatgcctttaatcacagcactaaggaggagtataaggcaggaggagagaaaagctcagggcaatctggggtttggtggagacggaaacagtctgaggcagtctgaagtttggtgatgtaatctgaggacaggatcagcctttccatctgagcattggtagaggtgagaactctctaatgagtggccactttgcttctctgatcttcaggcaagattataaacaaaatatcacatgcaccttttaagattctcagtcagggcttgcaattatgatctattaaatatctgaacagtctagagaaggtaaccaatctcaggtgatgtgcttatagataggaattttactctccatttaaagaaggtcacttactagagagcaacaaaagagattaattttaacacaaatattggctaattgttcatgacaaactgagaagtcagtttgtagcaggggatgttgtgggaggatatgtggttcctccagcagaatgtgacttgatgtcatgtagaggaatagggactagattcctattccagcaaaaaggaaactgggagaaccttgacaagcagtagagacatgaaattctgttcacagattatctccaagatggtcatagcaagattttttatcttctcgaaacaaagtctaacataccaccagtcaattttgattctctttggctccttgagttaaattttgtatgttataaactaagtgctcatttatacacatcacacaataaatttcaatatgacagattgaacaacatttttacatgtgtcaacatgggaactactgtcagtttttcagacagatgacagaggattgtagatctctaaaatgtgtagaaaagtgagaatagaatatcagggcttagacttgattcaactgtagaactcttttaaaaggtttgcaatctatgtctttaagaaaaatttaagaataacagaatttgctttgtgggaagttaattctactttccttaaagaagatagaataaagatgggcttgagaaaagaaaattgtttctttacttgatttattctgtctgtccctgtaaattatgactatattgttcttgacctgattttataaaaaaatggatgtcctgatttctgtccttcaggttctgtggaactcacctcaccccaagatggagagtcagtcttccatgctttcctcactgccccttcctttctcatagtccaaaaccacacacttcaatagcatcactcgcttgacctgactgggaaaacaattcttagaagctgttagaaattggcatcctgaaggttgatgtgaagtaatgaacaatccaagcaaacaatattcagaacatacactcaacctgcacaatctattttagacaaacaataggaagctttaaataccctgtgtgtcatggtggctgtttagaaatgacatctttcaggtgtcagagagtcttgtttgctctccctcacaaggtcacaggggagacagaacaagtttctgtgatgtgataccacaaaaggaaaaaagaatagcatgcccatgacctcaggagcatgagaactgcatttgttcttttgtaaagtgttggctattatttatttagatgatgataaattatccccagaaacttggcaacatttccatataattattcctcctcttaaaaccgtatttctttttattaggctattaatttgtctcaatgtaaaataaatctcaataccacatatacccataagagcatactacttagctgcaacagcccaaaggatggcatttaaaatgcaatagtttaatgcatagaattaattaaactgtatcacaaaatttctaaaaatctcattatattcattttatatcttctatatgaaaattttctcctgcctataacagaaaacttaagagtaaaaagaaataaaaaactttttttttctgtcaccataatggtatgactcagagttacatgtgaagaatctagctagttgcaatttaatcaacagtatctcacacaagattaagaaatctaggagcagttggtaaagtagtgaagagctataaacaataggatcctatcatctctattgttaaaactgacctgatttttaaaaaaagagccaagaaaacaaacaaacacaaaaaccctccaaaacatatccacagtagctctgaagagagtctgtgtaaatcgaagtcagagttgcagaccttcattctttggcctgaactctgtttttatagacaagaactgcaatgattatgtcaattgtcaacttggagatatagagtcacttgggatatggcctctaagaatgtagggaggattatcttcacacatttaatcgaggtagaaagacccacacactatgggtagcactattgtctggactggaatactaaattgcacagagaggaggaagctctgagcatgagcattcttcactctctgccatcatgacttccctgccatggtgaactgtacccctgatctgtgagctgaaataacccccttctcccttaagttgcctttgacatggtattattatcatagcaacagagaagtctgtctgacatcaagcagtaagaggcaatcattctttctcctcctacagattcctattactattaattctttctcaaaaattggatcaaagtgaggttgatgtaacacagtgtggatatgctcaatgttttagggatagaatttgaaagattattagaacataaaactcctaaatacaaatacattcactattgcactttcacttaaagcacaacagccactctaacactttcagatgaaggaattcccattttcccacaggggaggtaatactgaagggaccaggcccccatttcagcagccatgacagtaacacaacacgtgctcgctattaccttgccttggtcactagaggttagatgcctgcctcgtgacaaggaaccaattagaagttagctgttggtgctatgctttacgactctgtgtgtaatttacagacaagtgcacagcaatgaccctcagagcatagcaaccaccctgggagagcctatgggtcataacaaccaattgtccaatcaacacggggcaagccctccaagcctggaggcacaccaatcctgagcctgtgtgtacccctagacactcgccttatgatgccctaccagatcactcggcagctggttcgaggtgtcttttctagccatccaccatggccggtgggtgaaaaacctgagctaacatggggttagctcgttacaaaacaataaagcctcatgcattttgcatcaagctctcaaatttgcctggtgattggggtgaccatggtcattgcctgggaccctggatacctgagttttctgggggtctaacaatacaacatctcgtctctcatcgcacaaggaaaaccatgattgcaccagtaaaattaatccatcaacagtattggtgcaaatgtatttgtagatttatgtgcagcagttaatgtgtggcaaataatgctgtgagagtttccatatccagaaatgaaaactaaatcagtcatcagtctataccataaacagtatctatctggctcttccccaacagcaccaaaggttaccaacagtttttgtttgtttgttgttgtggttgttgtgtttccctttttccctatgggaacaactcaaactctatccctataattaccaaggcctaatagggcctgtttccatggagctatttcagattcttttaatctctgtgattaaaaatggggatacaggtctacaccctctgtttctcagattcccatcacagatctacgtgttacactatgcagccatatgtgggttacacaaggctacagagatcaagtgtgcttgcccactataatgatcagtgatgtcctgagtgttattcttttgtttaaaaagaagaaaagagaaatgctgagacatgaggcatgttgactataagtttattataaggcctggcagagtagggaggctaagaagagaagaacagggtaagtggctgaccgccatggccagttgctacagagagagcatataggtgggaaaactgagtagagaggaagcagcgaggaagccaagaggaagagaggaagcagagagagtaaatgggcagggatctttctttttgaagaggtcctctgcaacttcgtgcagactcagttcccatggaaccttgagctgaccagggtactgcctgttccaccaggtaacaggggcaggccagcataatnnnnnnnnnnnnnnnnnnnnnnnnnnnnnnnnnnnnnnnnnnnnnnnnnnnnnnnnnnnnnnnnnnnnnnnnnnnnnnnnnnnnnnnnnnnnnnnnnnnnnnnnnnnnnnnnnnnnnnnnnnnnnnnnnnnnnnnnnnnnnnnnnnnnnnnnnnngcgttgaccatctttgggggacccgagaagtttggggtgctgtcacgtcctggggaatctggttgtttcattgtagttcaggctgtatggaactccctggcacctcttagacctgggaagatgttggcagagcagaagacaaggttgagtttagaaaaaaatttttcttaggtcctgtcatggggggaagattgtaagatgagggagggtttcctgaggagtcccaacatgagggaagggattcctgggaccaggataagattgaataactggagtgaatctgacctgtttgtttggatccaatccagctccctggaacttacaagaatccttagagtttgttgaaacataagtattagacacattagcagcatatttatgttggaagcaacttgcctgaaagcattaacattttaaaattgacaatttttttttaggacaatgaaaagcatcttaatcttgaccttgtatttatgatcatatagtggtattgtagaactatgaacagtagcatgagaaatagagaaatcaggaacatatttcattctctttaatgtctcaacttattttataatcacttaagcctttttatcctcaggccttcgactacattctcagaccttcatacatctgacatttcctatcttcacatagataaaccctaaaatacctgttcctggaatctgttttgctttaagctggcaagactaccagtcgtcaaaagcatcagagttcttgagaaggataagattttacctgaatcaatgattaaagaataacagggacttgccagcaggctgcatggacacctgccttcttgctgatagcatgtgacctgtggattagactataggaagactctcctaaagttgtcccaagcaatgcagggaaagtcgattctactgtcatcttgtccacggtctggaatactttgtagcagttgagatgaagggcagggttgctcagtgactagtgttgtcactgactccagatgaagtttcttcagtgcccatcagtcttcttggaggaaatggggtggggccagcagctggcctatctctctgttataaaaagctttttaacaaaacattttaaatgccatattctctagatctctgagcatttgagggctgtctagtttagtatctcagcagttaagtttgtctttagttagagaaaaaaaaatccgtttttgtaattaaagttgtacctttgtaaatggcttacaggatggactgagtggtataaatattttgttagtttaaaatagacctttgtgattttaaacttttataatcatttaaagatacatgggttaaatttaagttctatagacttagcttatattttaagtatagttaaattagacctttatgactttaaatgtttaccatcatttaaagatatatagcaatttagaaatatgagacttaatagtttaatttaagttgtatatagagctagataagtataaaattaaattacaggtacaaaataacaggtacagagacaagcaggactggataacagtaaaagggggaatcagaatgtagcaaacagacaggagatttaaagggacagagtagacttaaacagagggcctaggaaaggcacagtatttagtaaacaagccatgaacaacagagccagtaaaagaagaaatcacagacaaaaaataaaataaaaagcaaaaaatctgtcagaaatcaaaaatccgacagacaggtttgctggcacaggccgctggagctgtgcatgcctacaggtaggtcacatgaccaaaacatcggggactgtaagactcttttggctgtttacctgcttgttttatgaaaccagaaaggttcctctatgcatttcccataggtgaggcaagtggaaaaccggcaaaaggctcctctccggatgcacgtctgcccgtgggagttgccaagggcctgcccccgaagggtacacagctgttccaaaactgaaaaaggacacagcgttctgaactgaaaaagccaaaaagcaccactcttggagcagaatcccacgcttgaccctcaggaaatgcacccaacaagtgaaagaaaaaataaaaagcaagatgtcaggtggcagtgcttgcctgtgcaagtcactgaactgagtaggcaggcctaagctagatcatgtggttatgaccaagatggcagcccccaggttagcacacatggccaatagtggccctcgtaagcatatttgcaattgccagaaaagtttcaaacctcattcatgtggaaaaatgagaaccagcaaacaaacaaaaaactctcagatcatctcaagcagacattgccaaccaagaagaaacacagtcagagatagaacatagagaacaatgagggacattcccaggtgaaagaaatttcccaatgggaggtagaactccactcatttatctattcgctggtagtagccgaaagatcccgtaaaatgtatttcccgttgacaaggccaaaaatggcacagattgctctgtctaagaacacctggcagaaagcccgaaagaagttcaccaggctgaaactgaaaaaaaaaatgaaccagagtgaacagtgctgggtctgccccatgggaaaagggatatcttaccggattgcagcaaacatgtagatgagtgagttccagagatccttagttggaaaagcagtgagttgaagtgtacagagttccagcaggaagtgccaggaaaagctgagatggaagtgggttatgagttcagattttaggatccccaagatttcccgtgctcctggcaggaaaagttacaaagaaagtttatcccaccagcaagcttcaggagaaagtctacggagagagcctaaaccaagtcaggcgccaaatgttattcttttgtttaaaaagatgaaaagagaaatgctgagacatgagacatattgactatacgtttattataaggcccagcagagtagggaggctaagaagaggagaacagggtaagtggctgactgccatggtcagttgctgaagagagagagtataggcgggaaaagtgagtagagaggaagcagcgaggaagccaagaggaagagaggaagcagagagagtaaatggtcagggatctttctttttaaaggggtcctctgcaccttcgtgcagactcagttcccatggaaccttgggctgaccagggtactgcctattccaccaggtaacaggggcaggcctgcataatgcctgatcctttcactgagtttagtgtcatagaccacaaagttgtggaaaaagaatattagctcacagttgaaaatagttgagattgtggtcctgtctcctggaaaaattagagtcctcttgaatactagaacttctcacttctcttagtcattttcagtggattatttgatgtatgtttgatctcgcagttttctgaatctctaaaatgggaatttttgaaaaggacatatcttaagctggtttctgttttaaggcatttatcatatgtcctagggtatcacacaatatacttggttattacttttcagccagcagtgagatttaaatttctgtcaaatgagatgctcttatatgataaagaacatggtgtgtacagtgaaggcccactgcagactctgcaataagagtcactattgtctagagagtggaccagtgtggtagcttacttgctggcatgcatctgtgtagcaagccctcagtgggaattttatgaatagacttctcctggagttgtatgtcatcatatcatttcctgcagtgaataagtgaacagagccattgtatctggcatcaattcccatgtgttggcacctgggctctgatgtgccctttgtcagtgactgttatctgagttactctattgaagcagtcacagaacttttccataggttagtctcagacatacctggtaaaccaggaagtttcttgttgctgagaattgcttaggtagtggttgcttcaaacaagtccagataagaggtcttggtatgtgaaaattgactttctaaagatgtctttgggttacaataaagaggcttttacaaactcatgaggcagtctatgagagtctgtttcttggcccggcctgtctcagctccaagacacggaaaccatgaggttcggcctgagtggggaagcatggacttggaaactcctagcaacccaacagcgataaagaccaaacacaagcatcttgtcatctttaaagagctctcagctccatgctgcaaaactggagtctcttgtttattcagcattttcttggctgttttctaaccatgcttccatggccacaaggtcatttctttccttctgaaccctctcagccccgtagctcctaactctctgtcctacttattacttaaacacctaacctcccacccagatgcaggcctattcaaatgcttagtcctgtagagatgcaaacaaggaggcattctaccctgaggctatgctatacaatagcagacttgctcgaattagcaatacaatagtgggccagagctcagggtgctcctgtttactgaaaccagaggctggaccttaagacattccataatggaactattttggtcctggacaagtctgactcccctgctgctgaggaaggagtaaaacatgctggagtggttgcctcctagaacatagaacatccacacttttcaacagcaacacatttaccaggaaccaatccctttaccacaccccaggaatctgtagctcctcattcctttctattctttgctctacaaagtccaagcatcctttcctaattgttctcacagatacattttctctccactcttagttataaaagaggtctctgaggttttgttgctgtactgtgagcagtatagtgagaagcaccaaagatatgccagaccaagatttggttatctagattcctataagataggtgtatggaattatgtatgaagtcacataagtataaagagatggagttaaagtgcttaaagcaattatcataagagtatgcggcatgctgccaagtatctctctgtgccttctgggtatatctcaaactaaaaaattatcttttaatccaaattcatgttctcataaccaactgacaaacaaggtctattagatagcatctttcataatggatatcaagtgttcacattcattcagagcatcacaattgggtgttgtctctatatagccgaataataatgaagggaccagctccccatttcggcagccataacagccgaactcatatttgtctgaccttgtcttagtcactaaggtcagatgcctgcccctttcggcagccattacacacagtaaaggggcaagtggggataatgacttccaagtcctaacattagactcagtatgtgtacattgacttcactgtggccttgctgttacatggcatcaatctgtgtgacccttgacacttctcatttcaattgtttggttttgggtggactgaagccaactaccacttgaccaaccacttttcacattccacactgctgtcctcagccctaatccccagccccagtgctcatgaattgatttgtttaaaaaaattcttctgatgtagttttagtggatttgtttgacaggggaaaatgagttgagtatgtccaacatgctacttatgcaggtaaagtttaatggaagaatgaggataccacaaacaaaactaaatccaaaattaaaaaaaaatccatcagccaagtgaatgagtaaacatttccctccatccacaaattaaaaacaaaccaggaaactcttggattttcgttagaattacctttatgactcaccatcagtttgggggagttttgaggtggttacagtgtttagttttctcacacaagaacatgaatcatagttgactatgtcttcagttggtttcttaggaagactgtattttataatgatggtatctatgtagtgttatctgtgtttcttatttttcttatgttaattatcttcgtacctcttccttatttgtacctcctgaagcccggtactctagaacaagcaatgttagatgctttagtgatggatcgggtggattttgtgaaactcttgatagagaatggagtgaacctccaccgtttcctcaccataccccggctggaagatctctataatacagtgagtatcatgtcatgttgctcaagatttgtttgctagttagcttcaggtttgtctgcctcctcaaatgctcatgttccatcacagttttcagaatgaagacttactttcaagttaactcacacccttgccatggaatattttatcttaagacagaggcaacagtgtgaataagaaaaaaattgctttttattcagttatttggaatatcttgacctaaagccactattaatatgttcttcttgggtcagtgaggtgcctcactgggtaaaggcactgtggccaaggctgatgaccaaacttgacccttgagacctgcttatccattgtgaaaatgtccactgcctgaattctccttcatgttcctttcaatactgtcctctcttcaagcatcatccaagttctgtcttcatcattgctccagtcacttaacagtgatctctttctagaatttagagcactcccggattcctttcagcacacacgtcttcacactgttggccacgtcttaggatatgcattactcttcatttcctgttattgtgaagaatctcttggatccccaggaagctgggcattgttaagggttcaacaaagtactgactgatagaatgccctcacatgcaaagagatttgattacttgatagaatttatatatgataaaggatagtcataagtgctcaaattttgtgcttcttactacgtaaaagtaacatcttactatttctgtatatacatgctttgaaaactactttgactgatcatggcttctcctgggaaactccctctttaagattaagtagcttaagtctcattaccaaagatgctgaagaagctttccaatgttccggttgcctatgtaatttgaaatacctgtgtaattctgaaacaaggcgcctccagcacacaatagtcaaaggaaatgattcttttttttttctttttttaatcacagaaacaaggaccaactaatatgtttttacgtcatcttgtccaagatgtaaaacaggtaacctaagtataaaagttgaaaatactctttgcctattaccttagagttgagatagttgaatgaaatttataaaatgtaggtttcaattttattgggaattacttactttttaatcacaaaattttattcttctaggttttcacacttcatttctatttttaaagtttggtccatcaactaagtgatacgagttatgaaaaacacagatcagaaggattacatagttcagtgatacagtgctctatgtaagaccttgaattcagttgtcagcaccccagaaacaggccagattgtgggtttcatgcttataattctaggacccaggcggctgaggcatgaggatccaggttttaagggcaacctgggctacatattagactctgtctcaacagaaacaaccaaaataaatgaagacacataagcaatggattctatctatcacacagtcagtgagaacatcagcagcacaggctttttggggatatctagtgtatgatttctgatgttttctgttatcattattttgagtaccagtggcagtgtagggatgcaaacatgcttttgtgtgtctaagttccattgcagggggttaggatggttcaacattcttgctcatgtttttctcagagtgttctcattaaatgttgagtagcacgtgacttgaaaatttaaaggtttttcatttgtcactgtgagaaaaagtcacccacagtacacttgaagaattctctccttttttgaaacttggcatctcactgggtagagtgtggactttctgcttctgttgacttagttggagagtcagttaaaaggaagatatttatttgtcaattttacagtaagaaaaattgtctctgaggatacagatttaaattacattgatttgagccatagcaaaaatgacttgcctaaattatttcctaaatcttcatcacaatatgctgaagagaaagagatggataagttaagtgtgttgccctttgagagcatagaaaaagagatatagaagatattgaagaacaaagttgtgatgccttgatctttgttgtagcatacccttctctcaagctacagaataacgctcatcgatattgggctggtaatagagtacctcattggtggagcctatcgaagcagctacactaggaaaagtttcagagttctctacaacaacctctacagaaagcaacgcaaggtaacatcactgaaaagtgcctcagtgcaaaaatgtggttagaaggctatgaaaataatgattttttttctactgacatgagtcttctnnnnnnnnnnnnnnnnnnnnnnnnnnnnnnnnnnnnnnnnnnnnnnnnnnnnnnnnnnnnnnnnnnnnnnnnnnnnnnnnnnnnnnnnnnnnnnnnnnnnnnnnnnnnnnnnnnnnnnnnnnnnnnnnnnnnnnnnnnnnnnnnnnnnnnnnnnnnnnnnnnnnnnnnnnnnnnnnnnnnnnnnnnnnnnnnnnnnnnnnnnnnnnnnnnnnnnnnnnnnnnnnnnnnnnnnnnnnnnnnnnnnnnnnnnnnnnnnnnnnnnnnnnnnnnnnnnnnnnnnnnnnnnnnnnnnnnnnnnnnnnnnnnnnnnnnnnnnnnnnnnnnnnnnnnnnnnnnnnnnnnnnnnnnnnnnnnnnnnnnnnnnnnnnnnnnnnnnnnnnnnnnnnnnnnnnnnnnnnnnnnnnnnnnnnnnnnnnnnnnnnnnnnnnnnnnnnnnnnnnnnnnnnnnnnnnnnnnnnnnnnnnnnnnnnnnnnnnnnnnnnnnnnnnnnnnnnnnnnnnnnnnnnnnnnnnnnnnnnnnnnnnnnnnnnnnnnnnnnnnnnnnnnnnnnnnnnnnnnnnnnnnnnnnnnnnnnnnnnnnnnnnnnnnnnnnnnnnnnnnnnnnnnnnnnnnnnnnnnnnnnnnnnnnnnnnnnnnnnnnnnnnnnnnnnnnnnnnnnnnnnnnnnnnnnnnnnnnnnnnnnnnnnnnnnnnnnnnnnnnnnnnnnnnnnnnnnnnnnnnnnnnnnnnnnnnnnnnnnnnnnnnnnnnnnnnnnnnnnnnnnnnnnnnnnnnnnnnnnnnnnnnnnnnnnnnnnnnnnnnnnnnnnnnnnnnnnnnnnnnnnnnnnnnnnnnnnnnnnnnnnnnnnnnnnnnnnnnnnnnnnnnnnnnnnnnnnnnnnnnnnnnnnnnnnnnnnnnnnnnnnnnnnnnnnnnnnnnnnnnnnnnnnnnnnnnnnnnnnnnnnnnnnnnnnnnnnnnnnnnnnnnnnnnnnnnnnnnnnnnnnnnacacacacacacacacacacacacacacacacacacacacacacacacacacaatgcatacaaagtaaacagagaggactgaagagatggttcagaggttaagagcacttgctggccttgcaaaggacttggttcatttcacaggcactccccatggcagctcacaaccatctgtaattccagtaccaggaaatctgacactttctccttgcctccatggttatcagacatgcaatggtacacattttgcagtcaggtaaaacctatatgaataaaataagaaacctataacacctttttcttaaatgagaaaggaaagataatgttctgaaagcagacatgctagctttagctcaaggtcactgggaagatcagtcttcaaagagaagaaagaaaggtatagcataaaagtcttgagatttatgatgaagtatagatagatattgatgtgactgggctacaaggcattaccctggcagtggatacaagaatagacaggagtttagtgaaaatgattgtggagacacaagagtagatggatccttatattccttctgtccatcaactttatgcagatgtaatgtctggctttattgttaacaaggaaaatgacagtaacatcaggaattgcttttgcattgcgggaattgtggtggaggcagtgagaacaccagtgatttaacaaagtcccagagcttcacatgcatgggaaactgaacactgccccacttttaaaacccaggcagggaaaaaagtagaaaaagtcacctttaatgtaaatgattattacttaatttacaatgaaattagcactaagaaatctttagaagctaatagaatatcattacctggctaagtcacacaacataaaacctgtaatgcagaaagtctggtgtttttcatgaaggtacttagtccctttgtacagaaaacaataagggacagatttcaactactgtgaactaaccacttttaagttcaaatgcatttctataacaggttttatttttaacagtaaattatagaagttacatgatccagcactatgaaatgatctgattctcctgtctgggaaattgcttagagctgttattcaaacctttgaggacctcctattttatgttagatctcctttttcacttcaaaatgtaactgtgtgctctgattcaaatgttattgaactgcagatacatccccgcatccaaaggcaagacacagcatggggaaagcccatattctcaacattcatccatcacaatttcacaagtaatgttgaaagtagaatcattacccaaagagatggagtcagtgcattggcgatgactggagagagaactatgagtcaacattttatgtcaaccagacctggctatagtacacagttagttattcagaagaacccactaatccaaggatagctgtggagatatttttagacatggttaatgcatgaaatcagttccaataaataaagaatcttggtaggttatagccaagcaactggaggaccccaaatgcacaaagaactaaggattttctgagaaaggcaccagccatccataacagctgcaagctgacctcagaactgcaggctgctctcaagttgtaagctcactttgcaagagcatctgaacatatatacagatatgtaggaaaataacaacaataagaaaaatactctgcataggggcatcactctatctctctactcatagttccctggctggacataatgcaaatcaggctattccattcttatctgctggtattctggtcatttaatgaggaaaaggaaaatgtgtacaatacaagtttctcttcatggctatgactgttacactccactgtgaaaaaaaattctgagaagttggtataattaaaagagaaatgtaaaaatgtctttgttgtttattgaactctgatgccattctaaattctaacagtatccttcctaccttcttccaaatttcaatagtaaccatttgtatggggttcacacatttttatactactcaccagtcctataaagatgttttttaaaggcagaaacaagtattagatatagaaatgtccttagttggtatgaaggaagtaattaactaagagaaagaagccaaagtgaaaacaaaattatggattcaacaaaacaaaattggggaaacttccaaaagaaacccctggcatatcagctggtttacaggtatagttcatttcactctagcaggcgatcacctgttaggcagacaccatgcagagttactgatttgatttgatttgcattctgttaacttgtgtatgaaataatgcctgtatcatctcaggtcatgatccatattgttggaagcagcttttgaattgtccattgcattctcaatttcagtagtttgtctgaggtgacatatttctgaatgaatggtcctcagaattcccatccatggcttaagcctgtctgtggcactcctggtaaagcacagccagagctctgagcaactggtgttctgaaagttggttgaacactgtattaaagctcataactctagatgcctttacaaaagtagtgctcaaaacttttattttacactatcaatggttgataattttcagtagtcttctcattccccaagtctgccttataacaaaagacaggcagctcaacttctaaccacagtaatcatcttctgtctattgaagtcaaacttgataggcaggcagctatggatcatccactagaattttcatttgatggggatactttatctgacattctagaatggaatgatatttactcagtattttatcagacactgagagttcaggggtttccctttcatacttcccataacaattatcattctgtgcagattgtagactgtcaggcggcacacccaaataaatacagatctaaaatacagaaccctgtcctctgcaggagtttaactgtgtttgaaaacagtatgctgtagcccatctaattcaggagaaatgagaattaagggctgcagtgggtgagaaaagtactttcgttataaagaacgtatagcttattaataaaagaaataacaagaactggatataacaaaagagaaggcattataccttaaaaggaaacatgatcacactggtgagaggtcaggaaacagagggacattgctgtcttcatttctccttagtcgtcagggtagttaatactatcatatgtcacagatctcacttaaaatgtttagtggggtcagtttctatcatttaaacatggacatcagcaaaattcactagtgatttcaacaaaaaaaggaaacatcatttttttgcaaattcatggacaatctggtggttttaccttctgacatgaggttagaatatagtgtcttattgctttaatattcttgtgattactcaatgctgcttgtttttattgctgtgaagagacatcatgaccacaacaacttttataaagaaaacatttagttggggtggctcacttgcagattcagaggtgttctttttttgtagactagtactgatggaaccctgaacggactagagcactgcctgagtgcattctgccaggtgacaggggcaggtcagcataatgcctgaatccttacaagaggtccgttgtcatcataatgggtgacatggaaacacatcggcagatgtgttgctggattattagctgagagtcctacatcttacaggcaacaggaagacaactgagacactgggtgttgtcctgagcacaagaaatgtaaaaccctgccctcatagtgatacaggtcctctatgaaggccacacatactccaacaaagccacacctcctaacagtgcactcactatgagactatgggggctaattacattcaaagcaccacaatttaaaaacaatttactggggtgagtagaaaaacaaaagaaacaaacaaaattatacctacaatttgtaaattattcctgtctccatgttgcttcaagactataagcacatgaattctttttttttatttgagattacattagaatcacataatttccccatcccttccatctctctaacacctcccatatttatctccttgctctcttaaatccatggcttccttttttctttttttcatcaattataacataccttcttaaagttatacttcattgggtaatttattccagttgaagaggcatcataactcagatattttttatagaacatcaactgtcagattttggtgcctcagttgtaacaaaactgtaatttatttcatctggataacaaattctaatatcccttgtcctcatctcaaccaactattccttgagcttgactctttataacaccatagtgtgcagcaaattttatttttagtaatttgggccaatataaatgccacttgaaaattatttactgactaagacataatggggttcaaggagaacccacctcatcctctcattgttacacatttgtggcctgtacttgtctccagaacaacagccctgggtgccctgggatccatatgtggacaacagaacacaggctggcacccagcttgctgctatttcgagactcttgtatctgccaagacattaaactaagttttcattttgtgacactttccctaaaggaaattccaaagagagaagataaaaatggataaacttaaggtatgttcactttccaatacagccaggaaagagagggaataaatatctgctctccattagattaatcttgcaattctcaaaattcaaaatggttaccacacactgagtagaggaagtttacagaagtacaaacttatttaaaaacacagaaataatgaaatttgatcacagacatacctaaggttataaataagggacaagtagaaattttcacaaagaataaacttgtgttaggccttgaaggatgagtagatataaatatttaaaaagcaataaactaaatgcagttaaatcccaactgcatagccccgggtctatttgggcctgaatgattgtaggagtctttgaaatatttttaagagagtgctgaatatttatcctaaatataaaagcatgatcaaataaaaatgatctaaacaaagcaatgtggaggatagtctagtgactgattaaccaaaatataatgacttttgtaccttgtccaagtcttggtaaatttattcaacactagtttatgattatacatgctatgaaatgtaattattttcaaaaccatcaatattctagttgataagagactttaaagctttcattctccaatcataaatttgcatactcatgccagtattttaaactccattattgcactcattactgaaatccattaaacaaattcttgtatactaaaaaattaccataaacagaagtttgggatctcattctaactattacttacccttgcggccaattcagcccaggatctctctatccataactataacagaagataagattggaggtaaaaatgttgggttttgccaaatgttttctgcacaatatgaaacagctatttgcagataaagtatatatatacactcataaatgtgtatgtataatactaatacaaaataaacttcatatgtttagttttatcaactatggttacatagataaccaaaatatacatataaatgtataatatatataccactaataattcactttaattctaatccaggttgaatatagttgttactttgccatttcataagagaaacagaaattagtgagagctattagcttcgtggagcttgccttaaacctctgtggagaaacaataggtcaattctacattttaatgtattatctatcaattagcttaacttatgcaaatatcaatcttctgaaaatttgtggaaataagaaattatcactactttcttttttcccattaaaaatttagggaaggttaaatacaaagatgtacaagaatggagtttctactaaaactcaacgcagttttgaaagttaggataaaatttcaaaatctgaaaaggaaagaggccagaaaaggagagagttgaatgaaaatggagaagaggactggtcaatttcctgtgcaggtgctgtgtccttggcatttatcttcatagcaatacagcaaaacctaaattcttgaggacaggaaaaaataaaataatttcctccacaaaatgtaagattgcttttattacccccaaacttttgcacatgcatgactatctctatgtggtctacacatgtgtgtcatagcaagcttgtggaggacaatttgtaagagttaatcctttctaccgtatgtgttctgtggattcactcaagccctcagatgtgtgttctatggattcactcaagccctcagatctggtggttagagtctttacctgccctcatgtatattcttgaagtactgcaagtacagataaaggatctggttaaaattcattaacattgtcattgcttccctttacatcatcagaagtcaccttagtataggccttgcctgcttggctggaactagcaaagggaactgatccaaagaagtttatttcccataacattaataagccaactgatgataaaaaaaaaaaaaaaaaaactgaccaccgggaaaacagtaacaaatctcaacaaacttaagaaaacaatgaagacctgttctcatgggtggcctgaacagcctattggttctcaggaatgacaacatttattctagtgccaaccgtactcattggtagtcttatgtgtgttgtttctgtgacaaccactacagaggcatggctagagagggagaatatgcatgcatataaaaataaaatggtgggctggagagagggatcctgttgagaacaccaactgctttttcaaaagaacagggtttaattatcagtgcccacatggtggcttataactatctgtaattccaagcctaacaagcttaagagattcaacttcctcttctggtcaccatagtgcagagagagagttacattgaggcaaaatacccataagcataaaataaataaattcattaaaaataaaaataagatttctaaaacttagtcactttaaagatttactcctcctccccccccctctctctctctctgtgtgtgtgtgtgtgtgtgtgtgtgtgtgtgtgagtgtatgtgtgtgcattagtatgcttacacacatgtgtgggggtgctgaagaggatgaactgttacactcaaactgtgggtccaaatacacccttacttagtgcttcatgtcagacattttttttctcagcaatgaacaaatagaaggccctttgctgtaataaaaattgaaagaggcagaggaacaaggtgactcacaccagcacctgagagagtgccatacaagtacattttctcacgtgtgcattaaagacacatgctgagcctcataaccatccaacaatcctgcatagcaaatgggggctgccacttgtgcgatttatatttcatggtcatccttgcttcacttacactcctgagctactgcttacaggctctagaattacgtgaatctaaaatttccaagaaaaactgaccttatacaaatgaaaaggcaataaagtctaattcaagagaggatatctttcaaacaacattaaaatttaaaagacaatgcaatttgttagatgtatactgctcattatatctaaagagtcagaaaatactggatcctatagcctaaatatacactactttaatcaaaatttgatttttaaaagttcctggaacctaaaaaactaaaactatattctaaaattaaatattgagtgacctttattcaacaattgtcagctgcatttttctgaggtaacattacactaaaaatatcaactcattctaggtcatgctttcacttaaagaattctcaccaatgcttgagaggaagccctttccttcccttgcccccattctgccatctcctttattctgtccaagttctgttctgagatattaaacttttcttactgctacttaactcttcatactacttagtggattttaacccttctaaagtgatgctaactcatctttctgatttattctctttttggtcttattctctgtcacctgattttgtaaatgttgaccctcttttctccctttgcctgttttattctgtctaccatgtcagaacatatatccatcccaaataaatgcacccaaatttcaaatattccacctaaattacaacaatttttcctaaagctgacaacaaggatatttggagagagtctagaatggacctataaagtctataactaaaatgatgcttaatgaaaacctgtatcataattaattgtttaatggcatcaaaccacataaattattttcttcagtgttatggttttacataaaattttctcaaagaagatattgaaagctgatgaatgataaatgactacaaatctgtaaacttttaatagctggatttctgtgcttgtgtcagacagtaacgtatattaaatcttttcaaaaaataaagtttgaatgttgtctttttcatcctagaagcaaaattgttgacattttatgggaatacacttaagatcccacctcaccaactgggcaggcattagaagagaaaataaggttggaggccttagtacaactactggaggaatagttgcatttagtaaagctaagggtattaacgctgtaataaagtttccctgcatacaattcctcaaaaatggagcatgctaaccttacttctgtaacactggttaagttcaaagctactgtagactgtagaaagtgaagcttagtgacatttgaacctgatttaagagctttgctcatgaccagtgattactcagaataacaaaggcatttaaaagtagatatatccagcacttcatccagttcctttaaaatagttttattattttttgagaatttcatgaatgcaaacaatatattttaatcagaattcagaactgttagagccctgacctgttttatcattagatctttcctctcttcccaaataaacaaaggtcttacttgcatttttaatgtgtagacaacattcaagtgacatagaaagaaaatgagaaaaaaataacagtcaatagagaatgcttctccaagttcagtaggatttataatttacttcttagtccaaattaaatattcaacatgtaccatcctagataaaagtatacactgtcagtggttcaatttttctttttagggtgttgtaaagaataatcaagttataactaaacttgtttaaaaaggtaattccacatatatagcattcatagataagtaatactataatatcttcacttttgaattttatttgattcatgtttagttttctatttgtgtgtgtgtgtggggggggattgcggtgcatgagcccatatgtatgttttcacatttgtggaccaaagagttgtgtctgtatgcttatggtagcctgggtttgacatagacagttatccttggttgttgttctgtcttattaaataatgaagggtctcttaatcaatcccagagctctccaacaaaggtagccttgtgtggtagtttgtatagaaatgtccccaaagactcatacatttgaatgctaatagtgtcaaccctaagtcatgtaactttgttggagtaggtgtagctgtgttggagaaagtgtgtcactaggggtaggctttcaagtttcatattcaccagacaggcccagtgtctctctcttactgtttccttctggcccagatgtaaaactcttagctcatttccagctccatatctgccacacaccaccatacttcccaccatgatatcaatgaactaaaccttggaacctgtaagccaggtcccaattatatgttttcctttagaaaagttgatgtggtcatggtgtcaatgcacagcattagaaacccaaactaacacatcttttggtcagctttctatggtaatccttttcttcacttactagacaggctaccatgcccacccagcatttacataggttctggggatctgaaaatggatctcatacttatgcagaaatcgatttactgaatgatccatatttccaaccacaatataatcatttacaaagcacaaccacatgcagagacatgagttatgtcaggtgattagttctccaaatatccaatgtgcacagtctcacctgaatgtaagagaatgtgagagaaagaagggaatgaaagagatcagtatgcttgcttcacaatgattgcttcactggaagctctgaacacacggtctgttctatgttatggctctcttctccaaccatggacttggtctacatctttactctcacacatgtaacatctccttcctttctctctcactccccatctatctcatttaattatattcatataaatatacatgtttatacagggatattatgtctatatacctgtgtgtatatgtgcacatgcctttaaacagtatcataacattgtaaagattgtcaagttgtagaaatagtttttgcttcacatactccaggtcagggattgtgaagcatccttccagaatcttgccttatccttcatttggtattatcaaaatgtaagttttaatgccatttccttcacactatattctatcaagactcttgccatttatactaaatgtaataactctcttctactcaagcatcttgagtttgagagtcaacatatttcatatttcaggttgtagtgttgcctggaatgtgtcacatagacctaagactttcaaatatccatgttggaattgatagtacagatattgatatttaaaccacacaaatatatcgccaaacaaaaagactaaccaagtcatatgcctagtccaaaatataagttgaaggcacagattgattttatacattaatttggataattgtgagaaagtgctatattgattacagaagagattatttatttattttaacttcaaatgtaatgggcattttattatataaattgatgtgtttagcttgtcaaattgaaagttgtatttttgaaagtaatctataagagaattaataggggctggcaaatagttgagtgattaagtcatttgctgctcaatcctgaagattagagttcagttcccagcacccaccttgcctgtcaaaaatgccagtcactccagcttcactggatccaacactgcttctgacctccacatacatacatgtgaacataaactcacacaggaacaaacacatacacaaacacacaaacataaattatataaaaatgaagaaaaatactagaagatgtagatatagtaaataattttgttccagaaacttatatgttataaacaaagccccaggaaaactcaaaaattaagacacagaaaactttgttttgagtaaagctttctacattaaaaagagaaataaaaatctgtttcactttattaatagtaattcatagtacagtttcacctttaggtaatgtctattctagggttgcctttttatattgaactagtgaccaagcaattgactaacatcttatattgaattaatttgaacccagagccctaagagacaggaatcactaatttacaccttaaaaattgacagttactgatctatttcttatggttcattaaaattatatgttaagctcagtaattaaaccatataaattttaccatccacgtttgcgtctctattttgaccacgtaaggcaaaagtcacagcttcccatttaattcctctaattaataaactcgatttccccttcagctgttgatggcctgctttgtgctatttctctaagtttctgtctcacactttgcctccgacctatttccatgaagcctagatggtttgggcaatgtgccaagatttccccagtttttacaaacacattaaaatcacattaaagtcccttctgaaaatctctctctgtgtaccactgtgacacagtggcatctccatgcaactgcatacacatacttttagtgcctctcattttaactaccctgtttatttcggtggcagcctctccaggttcactttctgcatgttccaaggtatgtcccacacagagctgtagaacagagctgcaggaagtctcacacccacaccacagacttcctgtacactggagaacacaggaccaggacatcataggatgacatatctgttttatccccagtaatgtatttgttacatcggttttcttgtattttagcctgcaatagacttcttaccattttccacatcaaatatattgcctgtaattttctctcaccaaatcctaacctactaattaatttagtagcagaaatcagaatttctccccagtaatttccattcttcttattactctccacctttttagctctccatttccaagctcaactgaaaagaggatacttctctcttgcatgacttttattttgtcctcttcttcactttaatataatttccaagtaaacctcattgacgcactgaatactgtcttatgatgtgtgtctaaaaggactgataacacatgtatcacagatgtaagaggtagattctgtctgtctctgtgttagaatggctccaaaatattgtggcttctaatggaacaacgaggagttggggcagtaatattagttatgcactgactagacagatttcttctctaaacatctatatctttgatatatatatggtgtgcccatattatttacaatccaagtaaacagaattttaaaacacatttaaactattatctcttcaagtctcatgatataggtgctattatcagtctcacgtttccaaaacataaaatgactttgacaatctgagcatctagtcttattgtgcatagctaacagcaactcaaagagattgcaatcaaatctacctattctaatatcaaaattctcattgcagagtcatcttataaagctgcatgaagatattatattttcagtggttctgaaaagattaatagggtgattattggaaacagagactttccaaagttccttctaaatttaagtagtaaaatttgtttttactatggagaacatactgcaaaatccttgaaccacaaatttttttaatcacaaattccattctgtagttaagattttcatgtcaataaaaattaactttggagtatatagcattaaataattcacttatacaaaaaaataactatttttatttcagagtccaggagaggtgctagacatggtataagcataacatacacaggagggaaataatgtatgttttgttcatgtccagactgacagataaacaggaaaagaatcaatggatctttttttatcaataaaagatactggaaatgatgtagacaacaaaactcaaaaataatttcaagtaaattctgaacatgtggtaagatgatttgtgaattttgtaaatagtgagatataaagaagatataattacatagtttcatgagagggaattctagttcagaaaagactagacttcagtacattactgatgattttgggtccaagagtagtcatgcgtgtctatggtagttcattctcattagcaacttgactggatttaaatcacctagaagacatccctgtagatgccagtgaggatatttctggagaggtttagctgaggagtacgctgaaagtggacagtgccatcttatgcattgcatattggacttaattaaaaggaacaaaggaagaagacaatttgagcacttatattcatctctctctctctctttctctctctctctctctctctctctctctctctctgtgtgtgtgtgtgtgtgtgtgtgtgtgtgtgtgtgtgtgtgtgtgtgtgatatctgaaggtgtaacacaaacagctgtctcacaagcctgctagtataggcagaactactactgaaatcttgtcttccattattcaatgggctatgtgctaaaagatgagccaaaatggcctttatttcttctgttgatttagaccagcaatcagtcacagcaacaagacaggtaactgatacatatcatgtagtaaacagtaaaggaaagccaccaaatgtggaggcatgaatatccatacccaaaagatcaccatattgcttgaacatctatacatacctgtttccaacacagtactgcccacctgatgtcttctttcagaaacaaagctaacctccgtatctccagaaacatatgtccatacatccttgtacacctttctgtttccagcaaaacttatttgttccactgaatgtcagaaagttggagtctgtactggcttatactattatacacaatccatgatgcttaataaggattgtcagcttgataggatgtagaatcacctaaaccctgaccatacgtgaggtaatttttagggtgaattaatgaagatgggaagacattctacataagagtggaccagactatgatctggagacatggactgaatgaaaaggagagggtgagctgagtattagcaatcgtctttcttcctcactgtagatgcaatgtgaccttaagttgctgctttcacgacttccctgccataggggactagctccatgagttgtgagtcaaaataaaccctttcttatgttatttatgggtattttgttgcagcagcagaaacatagctaatatataatccacaaaagacattcacatcacatcttgtgatttcagtaagaaaatccccaccaacccttaactattctgagcacacgtattgatcttagggattgactaggcattaccattgctgtagtttacagtacctatagctatgagggaaaatttagaaaaatgagacttgtgcaaacacattcttgcaaagaaagacaaaccaagtttgagtgacctgaaagtcagtcccttgaccttttgatgtatttaatcttttcattcaggtttctgcccactggtctcaggatattatgaattcaatgaggaaatagcaattgccctttatgagatgcacagttgttttaagttgtaatgctctggacactttaagagagcttttcactatagagacatgattccctaatatgagaataaagcatttttccatctaaagcctgttctaaaggtttggacttcagagctttggaaactttgccttgtctaaagcttactctggtaatctctcacaggtgcctgaacctttctgctcagctgggaaggtctctattttgtgcgactcttccatgattcaccccattcacctgaaaccttttcattaaatcagtgcctcttgcagtgaaatttgatgctggcttctgcctttgttgtctaggtctggagcctggaaacctattcatcattttcatttgctaaggaggctggagtgcaggatggatggcttgagagcttcttgttttgtaatgattatctagtgtggactgggggaaagcattttagtctttaatttttccagacgttattccattgtgctgtggagtatgccacagggacccatcctttgcagccagtgagtgaatgagatgaccttaatgggcctcctgcacatctcccatctaggactccttaattcaattatccttgggcacgagaagagccttccatcaccactcctcaaatgactaactaccagcattactttctttcttaaagcctatatgatattttcaggtttttgctcttacttgacattctggttcacacctcctagctgtcattgagtgtgtgtaatttcttaattttattttagatttatttattttattttatgagtgtaagtgtgttgtttgcctatatctgtatgtaccatgtatgtgcctccacaggaacatggtggtcagggaaggatttccctgagactggagttacaagtggtgtgagccacccgctcagggtacagcaagtgtgcttcacttcaggagccatccagccccattgagagcatttcatccatgtctgaacatgtctgaagatcctaagtacagctatgaagaagtttcatgaaatgcctctctgacacatgtgtacctgtttataacaggtgtaggaataagagccattcttgctgcatgtttatccaggttaataacccaaacatagaagctgatcaagttatatgtataatttttacatattattatgcttctgctattagctaaaattcaactttcctgtctgacgatagtttatcatcttgaataaacaaaaccctaagaaaaaatttccttgtattcctttttttctttgtggggatccacagtggtgatgtgaggtacataattttggataaaatgagaaaaatttaatggaaaaataagtgaattgattgactcatacagtatttctctgggtaatggagtatacacattcctcgctgtgtctaggatttgatttgtcgagtttgccagctccaaatatgcagtctggggtgttgctgacttttagaaagacttgttactcttgtcatgacaactgacttcaagagcaattcaaatgtatgtagactttaaataaaatggtttctacacagatggcaaatgcatacaatactaatttttaaattctaaacaaatcaattcaagtaggctttttgcaccattctagaagatgatgtgttttaggcagataattcaactaatgataactatcctccatgcctttccttttattaatgtgatacccccaaacaacaaacaaaacaaacaataatctggtaggagacatgcagcttggtacaataaacaactggtgtgtaaaactgcctgattcaaagactctctgatgtcaaggtttgaatgtgaaatgccctccacaatcttatgtatcaaactctgttccccagtggtagagtaattttaggatgtgtaccacctttacaatatggtgcctggatgatgtgagcaggccactttgggcaggacttggaaagttatacctgtctctagttctggtctagctttctccacttctcatatttccatggcataaagaagccaagctgaaatccaactctcactatgtagaccaaactaaacagaccatgatagcctctccagctaccataaagtgctacatctgtaaattgtgacttaatagaatgttcaccttgggattcttcctttgagagttttgtcacagtgatgatcaaaacaaataatataacagttttcctttcctaccccaaagcacaaggtctaactctagtagacaataggtcaaaactgcagttttgtttctcccttacacagctcaatatgcatgaaaaatagctctgcagtgaaaacttacaaaggtcaataccaatgctgacctcatttaggtaaaatcacgggttgaatcaggattgctgaattaagagcttgtgctctgtgataaattctatgatgctagagtatcctagtaacatttagtttacccatggtaagagggaagttggagccacaaccttggtattttattattagtgcatgagaccatgaaagcagattgactaagaacagaggatcaatgaccattttcattacctaatgcacacagaagatggttgagtgcaactaaatttttccattgttttgggaacatttgcttaaacacatgtttttcggtgtatctctcgtccatgctaaatatacacatactcctaaatataaagccatagtccatgatgtatctagctatgggacattatttggtctcccagatgtgacacactcttgtttatgtgtctgtttgaatcctccactttcctggcacatcctttggttggataattcctagtgccttctaaacaaattccattttaagaaccttctcattttgaccctgcatgggatttattagaagtccattttctgatatgtcattggtatagtatctctttatttacaatactaattttcaaagatgtgtttgtgcctatttccaagtactctgttaaaaaattacacactaatttaaaattttgttcagaaactttcatgtatttttgagactgaatatttgaaacaataaatgaagcatataaaattattttttaggagatgccttcatagagggagacagtacaggtttggagagaggtctgccacagggaaaatgttaggggattcacagggatgaccccaactaagaatccaagcagttgttgagaaaatgccattgatgcccttcccctataatgagattgatgcaacccttggttaccattcctagagctttcatccagtagctgttagaagcagaaacagtcacccacagttaagcactgaacgatactactggaatccatttgtggagagggaggagggatgagcaaaggagccaagacagggctggagaaaccagcagaaacagtggaccttccctactgatagcatggagatcctagtcataaagctggggaaacaacattggaccaaaccaagccctctgaatgcgggtgtcatctaggaggccaagacagtgtatgaacctctaacagtggatccagtctttatccctatagcacaaatggatattgggggcccattccttatggaagaatactattgcagcccagatacagcaaggccctccacaaaattctatggtggactttgaagggaggacctcactatcactggggaggagttgaggggtgggtttggggagttggtggggaacatgggagaatgggaatgctagggaatgagagggtggatatgtaaatatgagtagtaattaaatattaaaagaaaaaaattaaaagaatattaccaaatattatcatataaaaagtacatacaggttctagcgatgtatgaaaaaatcaaagctcagtatagggaacttctgtacttttcagcttcttggatatttgaataattgtatttaatttaaagaatcactgtgctttgggtttttttgtttgtttgctttgagaaaaccctgtaaattttacaatctggactgcatcatcactgtgcagagaaaaacaaagattcaagacttatgtcaaagaaaattgtactctttataatttcctaaatcatcagagtttgttttattttgaatagtgtgtgtgtgtgtgtgtgtgtgtgtgtgtgtgtgtgtgtgtgtgtgtgtgtatgtgtgtctgtgtctgtgtctaggtttgtgcacatgagagcaagtgcccatgatgaccaaaagatgtcatccaagagatcccttggagctggaggtggttagttttaaggtagaatgtaggtgatggaaatagaactcatcctccttgagagcagaacatctcttaggttctgtgccactttctatccctagtttatatgatcctactaataaagaaaagctgaagaaatgttgatactagatattaaacgatattaatataactaatctatggctatagtatagagatggagggaaaccatgatcttacaagatgaactactgattcctgcaagaaaacagaagtagagattgacatgaaagccagtggaaaatatcagctgaagaaaaatgagtgaaagtaattgatactcattggaatatacatggggatagatgattattatgagtaatgcaaacagatatatttttacctcttaaatcacaagtaaatccatattaattacctttggattgaaagtttacaaggaaggagttagtcaaaaaatgtttaataccctctaaagaagggaatgatatgcatgaatctgaaagaaacatgtcacacaaaagaaagtcattttgaaatcagaattgagactatggccacagaaagtaagagacacatgtaaaacaagacctctgcaaggccaatgatattgaatgtcaaagagaagagcttccttatcatacaatttaatgtggatgcagaggaaacaaaattcataccatgtaccatgattacagaatttcactgtcataacttcatgactatcacaggaaagacatacattctgtattgtaacaaaggaaaagtcagacaccatgtctgagttacctcacagcttaaatgtgtatttgatcattatctcggtgtttgagagcaagatgacagctatttccaacctaatggactatgtgcccataactgctgccctgctttgctgttattaatatcacagatcttgacaagttgacaagatatatttaagtttacattcttttctcacaaattaaattttatgtttatgggtggtttgcctttttttttattttgcttgaaacttatttcaaaacccagtgtaagcattctttagaagcatggtaaacaataacaaagccctcctgaatatgcagatgtattatttcaactttgtagtctaaccctttctaagtcaaattaatatgaataactacatattgaatcaaagtaacctgcttcacacaccttgtatttcctagtggtctaactactcttcagttcatgtgataaaaaattctgaggaatgtattggaaggaaggatttatttttgcttcactgtttcaaaagagatagaataaatacatcatgataaaaaaaaacataacaacaggcatgggaagcatgccacaggtgccacaagtgactgattactttttcataagcacatgaccaggcgagaggaagagaggaagggagaggggggaaaaagagacaaaatcatggagaggctataaaccctcaaatcttaccaccagtgatgtacttgaaacaagactctacctcctaaagactccataaccttcacaacagagctaccaacttgaaaccaagtattcaggtacacgagcctcttgtgacatttgtgcttcaaaccaccaaggctatggtttgcatatatgctccccaaagagcagtgttgagaatgtggtcatcagtttataaaccagtgatgatggaaagaacctatgcacttagaatcatcccagatcatgaagactgatattcatcatagcatgagtagctttacnnnnnnnnnnnnnnnnnnnnnnnnnnnnnnnnnnnnnnnnnnnnntacacactggaaactagttctactatctatgcctttggactggccagaagcagggacaaagttccactacttccaaggtattaggtctcttgtattttgtcacaccattagacaataggttatattttcagaggagttgatgataagttctatttgttttattgtgggtgttccaactgctatggtgtcatagtacatataacagagagaaatatattcatggaatcagggctggaaagaaagactcccatgcttgtttctattcttaccttcccgtgactcctgtaaataaaagtcaataatatgtatgaaaattatttttagttgagtttgcctaaaacttatttcaatgcccactataagcattctttagaaccacatcgaactataacatgggagaaatatgtgtaccagagtaatgtggttgaagacatttctagatgacaagattacactgtcatgtcagacatgatgtcactactatggttaatatataggtagaaaactgacctggtgtctttcattagaacacaaagtagtggcacacaactgatttacagacccagatgtcagaggtgtctgtgtaaagaaggtcttattgtctgagaataaattgttttgttgcagagaataattttttctctgcaaatttattcatacagttttagttatacatgtactatgattatacttatgatggtgtaatattctatggaagaattagaatgcaacctgatcacttcttttcttgttgagaatagggcaatgcttcatattacagtctcttcttactttcagagaccctagttttgaacctaggaagactctctgaacccatgtcacatgccaccccaattcacctgacctcagcctatacacactccagagaagagtaggttcatgtttatctgtcatcacattcctgccagtggattaacaagggttctcttaactctagtattcctcaaatctgtgtctaggtgcgagaaaacctgctgatgacagtttccagaatgaaaagatacaaaaagctaaaaatgagctaaaataattctataattttggagaaaatactccacatataaataatctggtaaagagtgaaaacatcaagaaaatcaacaaacttaaaggtgcttttatttaattatgtgtttcaaacttccaacattttttgatctatatgtattgtaatataaaacagaatgtttcccaagtaggaatttaagttttctgatggcctgggaagatggctcaacacataaaggcatgtgttgcaaagtctaaagacctgaattctatatccaagaatcacgtggtatataaaaagaaaactaactcccctacttgttctctgatcccttcatacatgccattgcatgtacatgtccacaaacatatataataaataaaatgtaaaactcaaaagctgttagaatatggggcaatattcaattactgacaactttaggattcttaaaatacatgccaattgatatagaactgtcattcaataaaaagttgtgtgtgcctgatgttgtaccatgaagttgagcaacaggtggtaaaatgtttacaaaacagagaacagcttgatgttgaagcacaaatagttactgtcattattactaaattatgaccatagaatcaaaattaaaattaaccagcaagtgccatatgtaggcatatttgtatttgaacacagcattaacccacagaagatcttaaagtattcctacatttttgtctttagtataccaattgtgcctgtccctggacattccactgttccattataaataggaattactgcagagcttaaactaaaaattattttatgttgttgctttagaataaatctcacctggtgtagaattacagcttgaactgccatacattttaacctcactgattggatattctttgttaatttaaacaattctaaaatctctaaagtgtcaaaccacacacatatcaaatatcccttaaaaccacttaaacatttttctctttactgatggagtaaacatcatattttggagaatttcacagtctcatttaccttggatgttggctcacttcattcttgccttttggaggcaataatgacactgcctgaggcttctggcaatcctttctctttttctgtgtgtgtgagcacaggaactgactaccatataaaactctgatgtgcatccaaacctttcctccaacccacagatgccacacaattccagttattagtgttgcttaatgtcattttctaccttatttttaagttctttatgtcagggagtggaatgatggcttggtgtttaggagtgcttactgcttggtggtaaagggtgattactgatgttccaaagtacctgagttcagtttctagcacccacattgagtgtatcaccatcaccttcacgtgaaccccaggagatgattcagcatccttttctggcctcctctggtacccacacatacatgtctcacctcaacatacacacattttaaaatgaacaaattaagcctttataaaaagttctcctagaggacgattgttggctttgttgtagtaacacatcagaaatctctcagtgtttctgaatacaagttttgcttcattcttaattctccaagacattctttgttatccttgcgtaagtctgaagtaattacagtagagaccttcatcattctgcaccccaaatcctgacacccagtaggaacccatgtgctgaaaacaatgaaatgtcagctgaaaagcagtcctaggtaatgcctccccccattccacacttcttttaacttaaggggaagccagaattgaatgaattaaggctacaattattacaaagctaggtcagttctatcccaggtttaaaattgttttcagtgacacatgttgtatttcaccagtattaccccctgagaatctgacgtttgggtacaagttgctataggagattgcagacaggagtgttgggatttgagatccaggacaaagtcataaccagcacaagacagtaagcaggtacaaagaggccaaacataacccagggtgtttgggttcccacagagatgatacacaggcaaatctagaaatcactaaactcaatctatggaatctgtaggaaacaaatcactaacaacatattctaggaagtatgtttaaaagtaaaaacaaaaaacaaaaaaacaaaaaacaaagcccagagttcttagcaacagccagggttgtttggatatttccatgggatcctcttggccaacttaatttaaggcaatgcagtcccaggtgaggctccatattgcccatcactgggagtcctcattagggttatctccatatattccagatttccactgcactacattttcacatcatccccaaatgccccccaattccagccatctctctttccaccccatctcccccaacacctgattgctcccatctgccgacactcccagtctgcccataaaatctattccatttgtccctcccaaggagatccctgtgcccctacctgggcccctcctctttacataaattctctggatctacagaccgtagcttggttatcattgacttaatgactaatgtccacttacaagcaaacacataccctatttatctttctgggtctgggtctcacgaagattttatttttcctagttccatccacttgcctgagaatttcatgatgttattttaataacagctgagtaataattccattttataaatgtaccacattttctttatccatttcttaattaagagacatctaagttgtttataggttctggcttttatgaataaagctacaacaaacatgattgagcaagtgtccttgtgctagaatggagtgtcctttggatatatccccaagagtggtactgttaaatcctgaggaaaattatttcccaacattctgaggaaatgacatattgaattccatagagtatatacaaatttacactcccaccagcaatggaagtgtgttcctcttactccacattcttgccagcatgagctgtcacttgtgttactgatcctagcaattctgacacgtgtaagatggaattacaaagtagtttgtttgggatttccctgatagctaagaatgatatccattttttaatgtttcttgggcatttgacattcatctggtgagaattctctgttgaaatctataccccatttttaaattgaattatttgttttttgatatctagtttcttgagttctttatatattttgggtattaggcgtctgtcagatgtggagttggtaaaaatctttcccattccgtaggctgcaagtgtccttgccttacagaagcatttcagtttcacgagatcttacttgttatatgttgatcttagcgcctgtgctatctttgttctgtcgtcaagaagtcatcttttgtgccaatgtgttcaaggctatttcccactttctcttctatcaggttcagtgtatcttgttttatgttgaggtatttgatctacttggactgaatattctgcagggtgataaatatggatctatttgcattattctacatgtcaaatgacatctagtatgaccaccatcatttgttgaagatgctgtcttttttctagagtgtatctggactttttaaaataaaaaatcagggtttagataagctgtgatttatgtcttgctcttcaatttggtttccttgattagcatgtctgtctttatgtcaataccatgttttttttttattgtcctagcttgtaatacatcttgaaatagggagtggtgagaactcgagcagttcttttattgttaaagattgttttagctatccttcagttagttggacattgtctttcaagttctataagaattgtgttggaattgtgatagatatttcaatgtctgatttgacttaagacccacttccaagaagaaagccataccatacactgctttggtaaccaagaatcagagactagataccccagacacctaggggaaaccacactttactggtcccccaaaacaacaacaacaacaaaaacaaaaagagtatcgataaaatgactcatgatattctgctttatccatagatcagtatcttatccaggcttcataatagaggcttcctccagcagctggcagcagataggaacagatgcacagacccaaagtcagacattattcagagagagagagaaacacacacacacacacacacacacacacacacacacacacagagagagagagagagagagagagagagaacccaaatgggaggtccccataaaatctctcccctcagaactcaaaaaatcctgtagaataggaagcagaaagattgttagaggcagaggagatggaagacactaggagagcaaggctcttttaataaaatgggcaaaatacatatgaactcacacagactgaagcaacaagcacagaacctacatgggtctataccaggtttttattttgtcatgttttgtggttatctattagaagcctgttcttttttaatgagagacagaaatggatctggatgggaggagagatggggagaaactgggaggagaagagtaaggggagactataatcaggatatattgtatgagaaaatctatgttcaatatgaggaaaaaataaaaaaacatatataaaagtaaaagggaaaggaagctaccaaaaataccatgaaagactatattgaactaaagtttatgggtattagtggagttaggaaagagcatggaggatggagcagagtgtggttggtcagaggcaagttttaaatattttttctcccattgccaccacggtgctcccatgtcattataggaaccagttatgctggaccaaggaattccttgatgcaagaacagatcaaatgttcacaggataaaggagccagtgacatggatgggaagtgactacttgaacatagctgcttatttatctgttctcatcttcccttatgaacactgaagacttcatttagctttgaaactatttccttgttgcctatgtgctgttgcatgaacaatgagggcagatgagtagggaaggtaaaacttcaactgttagtgtagtgtgcacaagggcatcaccaagagagggcttattcaaagccaatatgagaaaagagctgagacttaatctgttgtcaaatgagagagacttgaggttgaactaaatcagaaagaggaaattcggccactgtcatgcgtgcttgcaatgtaaatacatcccaggctgatgcaagaggattgctgtgagatcaaaatcatcctgagatcctgtcatagtaaatcagagaacaacatgaacctaacacaaagcagaataacttaaattcagacagacttatgattaatattttaaggtttcaaaacaatttagaaaattctatatatttctcagagaaaattctgtttgtcattaaagaccaaatgttatactggaaagatagtgatcattacaggagtaacctaagagctggtggatagcaaacacttcagtcgtgtcatgattgacaggtgaaaacctactgatttttccatattaaatgtgtatacttatttacatgtcagtcatcctcaataaagtgacttctaaaataaaagaatcagggacagagagatagctcagttgtaaaagattcctgcctccagactgactacttgagtttgatttctaggactcaaaagacagatgaagagaactaactcctgtaagatatactctgacttcaacacatatgtcatggcacatgtatgtacacacacacacacacacacacacacacacacacacacacacacacacacacaccagtatttttaaacaacaaaaagatctagaaacccacgatttgttcattataacacatttgaaagttctagaaatgaagaagaaatgaaggcctgaaaagcatttctcctaattctaacatcaaataactctacataacactcagttgtaattccttccagggtttccaagcatcatgttcaggaatctaacacttaacaataagcacgatcttcaaaacacattctttactttgtgattaatcattctctcattatatatatgcttaactcttttctgaatgtcaaaattatcattgagtattaatgtgttagcctttggcttattcttagagtttgtattttggaagtgaaaaatgctatgaaatctgttgatattcattgtcaaacaagtttccaaaaggattccactgatttacatttccattaacatatatacaaatatcttctttttaccttcatttactatattcatcagtatttgtgctggctgagttaatgtcaagacacaaactaatgtcatcagataagagggagactcagttgagaaaatgctacataagatcaggctgtaggcaagccgggaggacattttcctcattagtgatagatggaggagggtgccaccctgggccagtggtcctctgttgtagaagaaagtaggatggacaagtgctgaggagcaagccagtaagcaccaccctttctagtcatttgcatcagctcctgcctcttggatcctgctctgtttgacttcctgttctggattccttcaatgataaacagtgatgaagaaatataaaccaaataaaccctttcctccccaagttgctttggtcatggtgtttcatctcagcaataaccccaactaggaaagaatttcaccagccaaaaatcagcaacaatgtcagtattctgaatttagtcaccacaccaaactttgtttctgatcactgttgtgttgtgaacacatcctatgaccatcttgcaatttatagtcattttaattcgataaagtatgacttaaatcaatgatgtcaagatttagaaataacacatagttcatgctcttggccatatttgtggttgcgtccttgtggctctattgatttctgattaccagtaaaatttattataaatttaaggaaaacaacatggtattttgatggagaagaactacgattaagctaattaatatacctattattttatggctagcttggatatttgcattgtacacaacagaacacagtaaagactattgggttattgtttattgctgtgatgtgaactgttaattaaacaatgtcttccactttgctggccacagatagtgcagctgggcttctcagggtgtaacctaaagcccagtcatcagcacatcagaagcacagtgggccaccctagacttcctgttgaccgaatgctttcaaaggattactgcatttctcacagttactgaagatttagaaaggcgatgagtacagtcctagttgctgaagccagtaagaagaggaaaatctccaggtgaggagcaatgaccatggtgctggtgaaccatgattggatctgacagtgttttgaatttacatttgatggactgtgataattggatagagtcaatacaagtagtaaaagcaacataagatttgtatgttaacatcacctttcctttccctgccccccaaaatggcaggaaataaggtgcaagggttagaggcctttttttaaatcaaataataaaaatgtgtgcttgtgttatgagaaactgggtagagtttgggttgtatttatgacctttccttttccctttgctcaagtcaatttacagttgtaccatcattcaccttcattgttttggaagaataatttgtgcctgaggtggtctattattcaaccacctctcacagaaaagtctcatgtcagattactaacatccagtttagaatggaaatatttatttctgttatattagcctgctcatgacttgacttttcatattcctgtgtagacagaataacaagggccaggatgatgatgtgaggctgggtgtgaagaaggaggagagatcagacattgtcctctgcaaaatgacttcataattagagagatttcacagaaagagttgtgcccaacccacttttaacaccagctgcaatgacgctcctcttactccatgtcctcttcaaaattctaactacaagtgttgtttccttggctgtgaaattggaaccaacctgactcttccccatatatgaagaagaacaatggcaagacaggtaagtacagctgtcagacaggcagtgcttgaatatgagaagagggaagagaataaatgagccatttgaccattgaatagaatgatttctccactccattttaggtttacagagaaatcaggcagtagggannnnnnnnnnnnnnaaaggtctggatatctacaaagatgacaccagctaacaatctaagcaacagagaagaggctaccttaaatgccctcctctgataatgagattgatgactgtcttatatgctatccttaagccttcatccagcagcttgaggaagtagaagcagacacccacaacttatcactgaactgatctggaattcagttgcaaagaagaatgagtgatgagcaaagaggtccagaccaggctggtgaaacacccagaaccgatatgaaaccctatcccaaagaatatgacagactctgatgacaccctatggaaggcctcaccctccccagggagcagaaaggatatgtgataggtagggttttaggaggaggggaaggagtgggaactgggaatgatgtataaaacaatcttgtttctaattcaaataaaaaaagatggaaaaaataaaaaagaatgatttctccactcatgataaagttacatcgaaataaactcattgcaatgccaagatattctcaacttaaaagatttaattttactaaactagggagcaccacagtgaaacagaagagtgggatccacctctccccaatgaaatgggtatatcaatcattatcaaacactgttagaatctgtggaaacattgacagcattaatgagaatatccttattttcttattagagcaaatactgcttctactgttcacttcctggcaaattacaaaaagatttggaaaatgggcaatttcactccccaattaacaatcttactctccctttcttcctgactactgtgagatgacagaccatctctcaattactagccagctagactttgttcatggcaacaacagctaccctaaataatctaggcaagcataaggaaaccacacacaaccgcagctgcttgtacaagttactgaagggacagtcttagctagggtgctttcaaaccggttttaacaggctgcttgctatcacaagcctacatggacctagatgacgctgcaaccattccacctagtgccgttcacaagtaattttcttggggccctggtagagggactgctgtgcttggtacaacagaaacatccatttatatgtggtgcccccatgattggtgcaaatatccttcttccaactatttaaggagactggggataacacctactgtgctagctcagaaacactcacctgtgctagcttgtgtggagctgtgacactggtcccaagaacaatttcttctaacccagtctttcttacctgcttttcacagtacaaattcagttgatagcatgaagaaacaacagagacagctgagtggcagtggtggccaagcagccaccaggctaagctgaaaaggttgaaaagcaacaattttcccagcagctaagcagtcatcaagggcagtagaggcaggaagggagggcatcaggagtgaatgaagagctgaggctgaggatggataaatggctacagaggagaagagagaagctgcagcttctgctgattgagagagtcaagactggaggccagaaatttcagttatcccatgctcaggagctgtgactatggacactgtcaagggcagggtgaccctgtatctatgcatgcatattccaaagctgcagtgccaattgctgccaagaactaaggaattctgtccccaggtgtttcctcaagagatgtaaggttaatgctgagcaatgatgccacatgcctttaatcccagcaatagggaggcagaggcaacaggatctttgtgagttcaaggccagcctaatctacagagtgagttcctggacaggctccaaagtcacagagaaacactgtctcaaaaaccagaaagagagagagagagagagagagagagagagagagagagagagagacagagagagacagagagacagagacagatagagacagagacagagagacagagagagacagagagagacagagagacagagacagacagagacagacagagagacagagagacagggagagacagagacagacagagagacagagagagagatatatggctagcaaacctatgagttcagaggcctggacacggtttgttacagaggacagtagctgttcctgcctgcctttactgctataaagcaatgaaggattcaaaaggtgctggagacccacatgcacactgggagggcttcttatcctgtgatggcacctgggtagagcaagatccctgtctaccaactagcaagaatacaacagataggaaagcaagatacatgaatgctcttagccaattgtctgcatcagggcaagctatcctgaaaggtgtgagacattcaaatgcacacttatagaaatatgggggctacacaaatgtgcacaaatattcacaatatcctccctcagaacccaaacagcaaatgatccaaatgcagacaagcaagtagatggttgatttacgcatatgcttacagtgaagtgttacttatgatcgcaatttgaggcatagcatgtagccagatgcacgagtctcagcaagaaacacaagacagtgaactacctaattccaactcaagaaattctcaagcatccagctccaatcacagagataggaattcatcagtgaccgattgggctgaggactgcaggcaactcatttaaaaaagaatggaagagccaggcagtggtggtgcacacctttatcccagcactcaggaggcagaggcagggggatctctgtgagttcaagaccagcctggtctacaagaggtagttctaggacagtctccaaagccacagagaaaccctgtctcaaaaaaaccaaaaaacaaaacaaaacaaaacaaaaaaacagaaaaaggaagaaaactctctctagctgtgtagttgtgaaatactgaaataataattaatagcacaaacatatgtgttcatgcattctatgatggctattctgggatgtcaacttgaatacatctgaaattaactaagaacaaagcatctgggtaaccctgtagagagctattcttaattaaatcttttgatgtaggaagatccaactttattctatgccacatctggtggcagcctttacaaaggacatggaagatgaaagctctctgtttttgcttgcttatcctcactcctccagcaagccctttttttcactggcatgaaaacctagttcttcaggattctgacatatactgaagactagctgacacatccagcttcatggactgaacaaccactggattcttggactttctattgctagacagccagacagccattactggattagatgcatcacagcctgcaagccactctagtatatcccacatatgtaatatatatgttatatatgtgtgttaataaaccatggaacttaatagattcaacagaacatgcatttatgaatatatgtgaatatatgtgtatattcagttgtgttcctctagaggaccctgactaatacatatccatgcatctgtcaagctttgctctaaattgattatattttaggaatgtaaactgtagctctattcatttctacatagttttattagctgtttgaagattcccagaataagaacaacttgtgtttttactaactaataaatgaatatgctacttgtgggtacttctcacatcagccttctaaaatgagtattcttaatgcatatcaccattattaactatagatataaaatgtcgagactcaatgatattagtcactaatatcatcacagattctctgtgagccaaaatgataagatgtcaattttaacccctctacattttcgtaatactcaatacttctgtaacaataaaaattcaggaaatcctcctcaatgtaatctaaatggttgtgcatggcacaaaaagaaaattgcatctgatatcctaaaatgcttataattatgttgatcctcagtcttgtaatttaagtaacccactatgcagttacataaagaacaatgcagaaactggtgaattgatgaagctctattccccttctgagatgtgcattaataaattcataatgtagctattttgaacttctgtctcatcagcaatttctcagactctttaatacactaaagagacttacaaaggtaatagaaataaaatggattttcagaggagatttggagatagttaaaaccattgatttagaaaaacaatcatgtgttaagctgttactgagcaggttaggaatggctgcctcagtacttgcatgccaccaaagcaaacaccccaaagataaatgatcctaagatagaaaatacagatcaatacacttggaatttagaaaaaagggcaatttaaaaatagatgtcaggataaacaggaaccaagtgatttatataaactagaatcatgtgtatatatttgcttttagtcccactgaagaagcaaacaattaactctataggaattggaggccgcagtcaggcagcaccaatagagaaaatgtgtcccatccctgtcacagctgtgttatgagtttattaatggacaccttggaaggagcacagctttcatcagtttaccaatgccaccctgctgttcacagaactgcacagaggcttactgaaattgctaggctgggagtaaagaaactcttgggcagctggttcagaatgcaaataaccctgtctttggtgttctagccttcccatttgtaagtgatgacagcattacattagtaaatataaatcaaacttttgcctgagttttctctactattaattttagttaatacataagttactgtggtacccatattcacatatgatgattctttgttcaccactcccatatcatattcctttgactcagttcttctttttcgagtcatccgttgctgctcaaatagttccctatttcctattattagtttcaaaattcatataataagtgacaaatatgaatgcagtttctcatgtttgtatttctagaagataaacagcctaatgagaataaactataattcagttttctttggtgcatattcacaaagtccttcattgcatagtgaagtcatgttgcagagagggaggactgatgagcaaaggggtcatgaccaggctgaagaaaccaacagaaacagctgacctgaacaaaggggagctcatggaccccagactgatagctgggataggactgattcagaccccatgaatgtggatgtcagtaagaaggccttggaaatttatagggccttaggtagtagaccaatatttatccctagcatacgaatggactttgggagcccatttcacatagagggatactctctcagcctagggaggccctgctccaaaggatatgacagactctgaagatcccccatggaagactccaccctccctggagagcagaaagagtatgggatagggagttagtggggggcaggagaggagggagggaaagggaactgggattgacatgtaaaacaaacttgtttctaatttaaataaataaaaaaggaaaggggaaaaacacatttcatctttgaattacacattccataaagatagtgcacattgacatggaaaacacctcatatcatatgatgtgatttttgcttcaggaaatactgtgtcacccataaccagggtgtcttaaattctggagaatggaaagtcttttgagctcttcttccttcttatatttcacacacaaaaaaagagttacagtaattaattgggtaagattcaaaaatgttttgctaagtttttcaaatatatgacttcatagttcagtttgtcttatacatctgagggcacctaatacaaaatctctcagctctaaaagttttaactgttccttccctacatgtaaaatagatgcagaggcttggaaattgggggacttctttttttgtttcctctctctctcctttcctctgtctgtcccttctttctttcttatccctaggaaaatagctgtgtagcttggtttgtaaccacttactctaaaacttataaatcatgcttatttatcatatgttacattatcttatgatgtaaagatatactgaagacaaattaagttttgttctttctaaatcccatggcttagtactataaaaataacattttagttcaacacactacatgctgttctgattttttattattctcaacttgtacaatattggagaacaatagcaaaagaaagatatgaggaatttgggcttttacttagtattagcagtaatactaatattatttgatctttagggaattaaatggttaaaggtagcaattttagactatgtttactgaggaaccaatgaaaagtgaacctggaggaagcctaattaactttaaatcagaaattcaccagaggcaaacattgtaaggaattagaagacagggactatttccatgtttcttaactattcttgtcaagtctaagagtgttagaaggttcagtgagtttatcaataaatgctggcaaataatttttttcaagagatggctattatccttgaggttcaaactttccctgctccttagcagtttaagaaaaaaaaaaacttggtggaagcaaaggaggtcacagatatgataggtcagatttcccaggattcctggagaaaagaaatttcactggtgttttcaagtaacagagcacagaggaaacaaaagtctatgtgaggtcagaaatgcaaacacccactaggaactgaacccacagtcttcttcatactagacaagcagttagttaaattccaaacacctttatttactttacattatactttatttcgtttaagacagggtctagctaggttacccatgccaccctggaacatatgtcataatagatgaaaatattaataaaaatatttacaattaaatggagtgtcttttgcattgaccaatcacatatcctttgtgtaatttagttctcttcatttggaagagttttcatgtgtattatctcatgtagtctttaaaacaactatcaaaaatttggtaaaatagtattaataaatccccaagagggtttgtaaaacaggagtaaaatgtagcatacatttttaaccaaaatttttacaacattgtaaaatctttataataacttcaattcgatagatatttgggctttatatttacaacttaggttgaagacttcctacatatgggctggggataaagctcaattagtaacgtttgcctagtaaccaggaagctctaggttcaatcttctgtaccaaaattaccctcacctacacactttattgcctgtgggggctacttaagacattgtgtcaaagataatgtctgtgttttctctagtgtaatgtttcaatgtcaaggataatcatgaattaaagttttaaaatagagtcaacaaatagtagcaacatgattcagcaatagaacatcacaatctggtcccatgtgatagatctcctgaaaaggcaggtgtgcaaattagagggtgtaaacttacctgtgagatctttgtgtagcacatatgtgaaacaatggaatctgggcttactcttgagttgtatttccaaaatacctcaatacagcaatgcaaaatgccctaaagccctgataaatcctaaaattcaaagaatgacagtacctcagcactttcgataagggctgctcaatctggattacgtcattgaatataatgtgcctgttttattcataaaagcagtcaaattatcaaaaattttaaaaaatcataataaaaataaatatgacagatattactcccaggtactacaattacaagaatatccaattatacccaactattgtattttgtaaggcatcttaagagtcattttactctatacttatgatttttatgtaaacaggtaaatttattaaaatatagtattcaaataatggacagtttaatatttttgaagtgatcaagtgaaaattcttctttttcatttctgggagacattttgctgtctgtaaagactgtccagatacctatatttacaattcacagatgacaataagaatacttataaggaatcaggaatttaagagctgctatttagaaagagagaacatgaattccaagaaaaaaatcaggagtagatgatttttttcattaacattctgtgaagtgctccatgtaaaataaacatgaggtggaatgaaaaaaaatatgcgattgggtggtatttttaaaaataaaggagaaggaagtcttaatatatttaacatacaaatattctaaataagtccaaatatagacaaatagtttcaatactatttttctttaaaaatgctgacaaagaaagtatgagattggtttaataaaattgaaaagtatttatttgtagagaattagagaaaggaacacagtctcattttaaacaagtggatattaccccagagataacagtcacagtgatgaaagagaaacacttcttctcattgtaatatgggaccataagctgcagtgttcttggcattctgcagggctcaagacttgctaatgagagtacactaagtcaagattatgctagatctagcatccttttggatggaaaaaacaacaatgtaaagaatgcatacatcagatgctaatgtaagcacaaatggaaaaacaggaagatgtggggcacggcagaaaaaaatgtccagttttgatattgtgccactgtgtaagcagttgaatttgtacagtaagccatgcaaaccaacaaacattgagatgagttgttggcaatagggtcagtgaagatcagagctagagataagacacaaaggaatgtcaggatggagaagtgcacaggatgtctgctgtcagcatagacagtgaaagtcatgataccctgagaaatgatatgagatacctaagggcttcaaatgaggacaagtaataactcctgagccacacagtaacatgatcagtgtatatgtgaatttatgaactgcagcaaaacaatgatgctaacaacttacaagtttctcacaataatttacttaaggcacagaaaacagatcaagaaaaatgatagcagttgatggcagtaaattgaacttaaatacaatgctgaagatacaccagtaggatcttctgattttatgttgaaggtgagcaaaggaaaggggttaagacagactcctctagctgatttgatcatgctgggtgcttaatgcagtccccctcccacatcaagtaagtgtcttcttgcaataaaggaaaagtaacacagaccatagctgaatggagcatccatatcatatctcctccctccaagactcagggatcattaaggaagaggaggcagaatgaaacatggtagacaactgctgtgaaagtgtgttttccagatattacagggatgttttcacacatgaactcatagactagactgtatgcagaagacccacacaagactaggctaaccaaaatcctgacacaggaattttggagactgggctcatgaaatcccacccctagctgaagatttattggcagttgatggtttctaggaaagggaggatcagttttctttagggatttcacctctaaatggttaccaagacttcagtagattgtcctataaccatgcaaatacagtcatcactaattggtctcagcaggtttgtctttttgtttgtttgtttgttctttttttagagtacatgatgttgagaggaaaaaaatggttggaagaagctggagggagaaaatggagatagattaaataaaaatcaattatatgtattatgaaattctcagtcattaaaaagtcattttataacaaacagatttcattaataaaagataggaactctccagtttgacctgaattagaatttccatgtattcaaagaaaagatagaactaggtttaggagtcatagcgaatgccagtttagcttgagacataaaaaatttgaaatttgaaataagtattaaaagttcaaatcccgctgttaaaagcaaatacttttgacaacaatccagttctactcagcagctttcaggtcagcacacaccacagaacagctgctcttcttttgggccatacaagaaagtttgtcttttcaggatttaccttaattctgccaagccatttactaaggaagctgtgccataatgaggcagaaatagtttgattggtaatgtaacaaattgaaaatacaaaaagtacaatttcaactatatcagttcaaatcccatgatcttacacattcaaacaatttatactatttgaccaaatagatatcaccaatggtaatacacagcaaattagactcatttatctccttgtactttatatttaaatgaagaacttcattcctcaaatatgttcagcttatattcagaaaggtgcatagtgtaccacactttaaggcacaggataaatttgggcctccctaatagctgtagaagggaagggacacatggaaaccaccaattactattggcaacagattctgagagatgaggaggcagcatattcacctgtatgccagcatgtgagtccactgggctcagtcaggaacaaattcggggtaacacagatgcccttgataacctctgtgggacagtaaacatgaccaaaactagcaaatagggtgaaaatttatacaaaggagtgggggcaggatgagtgtgaaggaaatacaagagggtaggagaaaaaaaatcagaacacatcatatacatgcattaaattgtgaaagaatgaaatttactactatgtgatattttgcatggtatgttcttagaaaatcattaagtgcatgtctgtgtgtcttacataggagtaataaggaaagtgctgtgtgctgtaccacttagcaagtaggtttacagtgacaggcacttctccacctctgtcctgctacagtattttaattcttttttttctatcattttttatttgaattagaaaaaagattgatttacataacaatcccagttcccttttccctcccttcctcccctaccaccccacaactaaaaccctatcacatagcctttcttccattcttgacctgactcagcctttctgctccctcatgacatttgcatccttcctcttcttcccttctcattctcatagctccctccctcctcttcccatgctctcaatttgctcaggggatcatgaccctttctccttctccaggggataaatgtttgtctcctttagggtcctccttgcttaatagtttctctggcagtgtggattgtagtctggtaatcctttatgtctaaaatccacatatgagtgaggacatatcatgtttgttttttgtgattgggttacctcactcagaatggttccttctagttctatccattttcctgcaaatttcaagattccattgaattgttttgtttattttccactgagtagtactcattgtgtaaatgtaccacattttctctatccattcttccatagaggggcatcaaggctgcttcaagtttctggctattacaaatagggctgctatgaacatcattgaacagatgtccttgttgtatgaatgtgcttcttttgggtatatgcctaggagtggaatttctggatcttgtgatagactgattcccattttcttgacgagtcaccatactgatttccaaagtggatgtataagttggcactcagagctatagtcctgaaaacagtttggtattggcacaaaaataggcaggtagaccaatggaatagagttgaaaactctaatattaacccacacacctatgaacacctgatttttgacaaacagtccaaatatatacactggaacaaagagaacatcttcaacaaatggtgctggcataactggatgtaaacatgtagaatactacagatagacccaagcctttcaccatgcacaaaacttaagtcaaaatggatcaaagacctcaacaaaaacccagccacactgaacctattagaagataaagtgggaaatacctttgaattaatgggtacaggagaccaattactgaacataacaccagtagcagagacactgagataaacaattgatgaatggaacctcctgaaactgagaagcttctgtaaggcaaaggacacagtcagcaagacaaatggcagcccacagattaggataagatattcaccaactccacatctgacagaaggctgatatccaaaatatacaaagaactcaagaagctagtctccaaaagaccaaacaattaaaaagtggggtatagaactatatagacagttctcaatagaggaatctaaaatggctgaaagacacataagaaattgttcaacatccttagccatcagggaaatgcaaatcaaaacaactttgagataccatcttactcctgttagaatagctaaaatcaaaaataccaattacagtttatgctggagaggatgtggagaaagtatcttaattcttaattgtactctttattctttcctttcagaaaaacctgctatgtgagtgtgcaatgatcatgaaataatgttctcccttgtcacttggggtaaattaaagcagaagattgtaaagtgtcctcacagaatccttgatttcaaaaatgtaaggccagcagccttctctcagtcctcctaagcagtgtctagcctcaggggcagagagacccttcacttccatggagaagtagatatctcagagccattaattaccatctgtctgatttggtttgacactatccgttaaagctttcactgactgtatcctgggacctccttacacacaagggtgactaggcagcaacgatgtattttacatttcaaaattcttaagcagagaattttggatgctagaagaaagatctgataagtgtttgaagggatgaatatgataatcagcatgctttgatcatcacaggatgtttacatgtctccaaataccacaccaaaactatccttgtgtccattaaaaatgaaattaaaatacaaatatttgatgatgatttatatcaatgagtagagataaaatggatatatattattcattaaagtcaattacagttctgattattctcaactcttgaaagcaacaattgtctgatacaatgccattagcaataatggaaaaacttttctagaaaaatgcaacaagtgcattttgtcaaggtattgctccctaaagatttctcaattaaaagtttgagcatttgggggacactatttttctgagaaaaaataacaacttaagtgaaatcatgcgaatttcttttttgcaaagattcaggaaggattataggatttagttatgttgtgtaaattattaatacatatgcttatagtaacttcccccacttgaaaaaccacaaggcaaaggtgtattctttttacagagtgtaaaaatagtactcttatccatattataaagagtaaatattaaagaaataccgcagatgtttttaaatcatcttgcataccaactatgttatattttcctctccccatatcctgctcccacacacacagagaagaatcagggagggaggaaaacagagagagatgggagatagagagacagagaaacagaaggacacacacacacacacacacacacacacacacacacacacagagtccctctctggtaaagaaacatactgaagttagagggacctctacatttctctcacaggcctgtctgtaccatcttcactaacataaccaaacttggaggagtgaaaagtttgaagatattctatgtgtgaccaaagttgttgagcaggaaagcaagagctttctccatccctctgtctagaaatcaatgattttatgcgacatttgattgtgtgacagtaacagacagaacttcttcaaagcctggtgtgtcaaatagagttatgcttgtctgaaaatcaaacagagctggcaggaaacattgaaagaaagtgagtttccagacagaatcgtgtatgaaatatttccttttgacatatggtttttgagcgaacatgtttttgaatctgaaaaataaattatgtgtagtctaatatctgcaagttgatcaaccaagcaacctgacattaaacaatgagaatcccactgtctaactaacatggagccttgtcacaaacagaaacaggaaggaggttatgaccctactaatttgcagcattgttttatttgctcaaaatggtttgtgatggttaatcagctataaaggaggacaagcactagcatccttcacatgcctcttgtcagtgctagattttacaataaaccaaaataccttctttccctcttgacatgatattggtcagtaagttacttggcaataaattctgaagaatatcagatatttataagtggaaaaatcctgatatgaaagagaaaacaatactacacattgctgagggtgaggaagggcatcaactccccagagctagatgttgcagctttcactgaacttaagtgcattgctgaagttaacaaaggacctgctataattccaacatgtagagcattgcttttacactgaagctctcccatctggagagaaccagaagaaccataagactcaggaatccaataaaatttacaaggcttaggaaggtcaggaagttttgagactcacacattacaggggcaaaaatcacttgggaaaggggtttctctatggagcagtcagcaagctagttgtacaactccaagggagcaactttgctgagtcttctcacatgcttgggtcagcttttcattgatacagctctctctgattcatccatgttcctgaaggtaactaacccctactcttttttgcattaatacaccaataccccattagttcattgaagaacttgtgtggagtcttgtttgttttatctattgcaacagtcttacaggtgtaaatagacatttatttgtttatgtgttccagcggagtgatagaacatcccccctccttttaagaatagttattctgaaggtaattcacgctgaatatcagatcccataaaagcaaaactaatagaaaatggatttcagggtggcaatccaagagatacaaatagagaacaggtagataaatgacatgaaatttcattggaaaacaattagtggatgacttataggatttattattaaagagttttaagctgattttatatatttatcccaatgcataatcaggaatataagtaacttgaggtttcaggagttgggagggaaatgccttagggataagtctttcaggtctgtcctacctaagaccaacttggagagttttttttaaggatgtaatatcaaagatttcagtgcatttctggcattctggggttgaagatataataatgaagtcaatcaagagatatttcttggaaactagcttcttgagttctttgtaaattttggaattaagccctctgtctgatacggggttggtgactatcttttcccagtctgtggactgctgttttgcttttttgaccatgtcctttgccttacagaagcttctcagtttcaggagatcccatttatttcttttttcattttttttatttgagttacaaacacaattgaattacatgacaatcccagttcccttctccctcccatcctcccctacgaccccccaactaaaaacctacctatcgcatatcctttgttggactcaacctttctgctccttcatgacctctgcatccttcctcttcttcccttctcattctcatagctccttctgcccacttcccatgctctcaaattgctcaggggatggtggctctttccccttctccaggggacaaagtttttctctcttagggtcctccttgttgactagtttctctggcagtgtgtattgtagcctggttatctcttactctatgtctaaaatccacatatgagtgaatacatatgatgtttgtctttttgtgattgggttaccttgctcagaatggtttcttcgagttccatccatttttctgcaaatttcaatattccattatttttttctgctgagtagtattccattgtgtaaatttaccacattttctccacccatttttcagttgaggggcatctaggctgcttccagtttctggctattacaaacagtactgctatgaacatcattgaacagatgtctttgttgtatgaatgtgcttcatttgggtatatgcctaggagtagaaatactggatcttgggttagactgattcccattttcttaaggagtcgccatactgatttgcaaagtggttgtacaagttggcactcccaccagcagtggagaagtgttccctttctccacatcctctccagcataaactgtaattggtgtttttgattttagccattctgacaggagtaagatggtatctcagagttgttttgatttgcatttccctgatggctaaggatgttgaannnnnnnnnnnnnnnnnnnnnnnnnnnnnnnnnnnnnnnnnnnnnnnnnnnnnntattgagaattgtctatttagttctgtaccccactttttaattggtatatggttcctagtctccagtggtgtcatattgagttttctgatgttgaatgcgtttttaccttgccctattctcgtcctttattctgctcagtgtagcaggagtttcttgctctcctggtgggtatgggatcaaggttgtttctggtagatgcaaacagatccagactctgatgtctgtcctcttctcttgggttgaggtgtcactattaccagggccttgccattgttcggttgtgttggatccctccgggctgggctgtggatggatgcagaactgccactgggtctcagtgtgttggagcctgctgccgaactcagatccggcacacagatcactggtgtcgagatcccatttattaattgttgatctcagtgtctgtgctataggttcaggaagctgtctcctataccaattcattcaagcgtatttcccactttctcttctaagatgttcagtgtggctggatttatgttcaggtcattgatccatttggacttaagttttgtgcatggcaacagacatgaatctatctgcagtcttctacatgccagcatccagttatgccagcaccatttgttgaagatgctttctttattccattgtatatcttttatttctttgtcaaaatcaggtgtttgcatgtatgtgagttagcatcagggttttctattcaattccattggtctatgtttccgttcttatgtcaatactaagctgttttcagaactatagctctatgataaagcttgaagtcagggatggtgatgcctccaattcagagaggctgtggataggtttatagaacatactactatacagcttcttttttctaaaagataggaagatactagaaaataatgactcaatgtgcaaaagatgcacaggccagtaggaccagtgtgcactcctcatcagttcttgtgtgctgaaataaataaacactcaataccagcacagtgggttgtttttaaatgtatctccacagatacttgaacactacaatgcttcgacagcttcagtgtctctaggcaacagggatgttccagtttccttataaacttataggactactgtcaagttatgtggcctgttgctgtttgtaacctcattaaaaagcctgtcactgtgatgatattcattaagcatatgactgctacaacatgaaatgaacacctatgaatatataggggaaagagagtcagaagaaaagaaaatgtagagaaaatactgtaagacccttcacaggaaaggggaacattagtaaatattttgattgcatgttctgtgtatgtgtatgtatgtgttcatgtgtgtgcatgtatatgggggtcgtgtgtgtgtgtgtgtgtgtgtgtgtgtgtgtgtgtgtgtgttctcagtcctcctaagcagtgtctgtcaatgttgtgagtcttcttcagtcattattcaccttattctttgaaacagtatctctcaccacacaggcagcttgtcagtttagctagactgtctggctagtattatcatagcttgcctttacataggtgctatatatctgaactcagatgctcatgattacagagcaaacaatttgctgtctgaatcatcttccaaacccaagtacttgaaagatattcaaccttgctaacaggcatggaaacactggttaaaacttaaatgatagcatttttacatagtctagactcaaaagtcaaccactgccaagaaaacaaagcaagagaatctgccaatgagaggatgttaaggtaactttggagtagttttggaaattaggacagccttctgacttagttaaacactgatgtttcagtttaagcaatctggaaatgtggctctatgttggcttcaagatatgcactgcaatccaatcaagatgtgcaactgaaaaactccattctgccagtgggctcacatataactgactatctcaactagctttatcctctttctttgttacctctgcttggtgttttcctgcaaatgccaggggagtaattaagaaaatctaacacttcataatattatgctaaattgtatatttagtctctatctttggagcctaacacacagcacctcaaaccattggatctatcacagagatcattgcatattaatataactgatcatcaaggcttcaaaacaacctgattatggaggataaatgcttggaagaagccatcatactagagtttagtggcattcactatggctgcccaacctccagggagagaagaggaactgaacattgatttggtcatgtgaagtgaaaaagtgaagagaggaatttatctgagaaaagttagggggagatcaaaatgcatagtatgaaattcttaaaaatataataatcccagtttggatctcaggtgttgtgtgttgatagaactagaattactttcttatttagtttaggtctgataatgaattttcacatattaattgtttttaattctatttgcttaaattttaaaatacattttatgataaaagtagaaaaataattaaatggtaaggaaacaaatagaaaaattcacacctagcctgtactaaaatttaccacattgcaatttttctataattatacttctcttatttaattgaaaatcaaccttttagcttaaaagaaagctagtactaaaacagagttcatatcagaataattatgtttttccccaaaagaaagcttgataaaatcaacttaattgtataattttaacttcccattattgaaacttaaattagtaatgataggtgtttaaataagcaatttccaattacaattaacataagcaattccttaccccagctgtaatcaatggagctattagagtgcagtaaacagtctttattgcagtgaattatgttctcacatcacaggctctctatcagatatactggtgtttgatgttttaaacttacatactacaaccatgtgttaatttcatgtacacaaatgtgccacttacaagcattcatctttgtgattttttttcatcttttctttgtaaatgaaactaaaaatgcattacagacagaaaaagattcaaactagaaacactagcaaaaataaacattattttttggctatagttcaatgattaaacatggcttgaagtgtaaatctcattgttattgctattactgtttccatttttaaagaggcacagtctcatcatgagacaatttacatagaaagaaacacgtttacatgaagcataagcagagtatttattcatgtcaaattatagatattctatcttttctacactggtagttccagaaaagatggtatatagatgggaggactcaaagaggagatgaaagttataaggctgtcctacctggcatcagaggtcaacttgacatagcctactgttatctgagggagttacaattgaggggtcaccaggatcggactggtttgaggtcaagtatctgagcaatggtcttgattgattgttgatgtgggaggacacagcccactctgagcaggaccatccttaggcaagaagcttaataaggagtctagctgagcaagtgtgagagaatgaccccagtagcaaacaaaatgcagcatccctccatggttcctgcctctaggtgtttgtcctaacttccttcaatgatgcattatgacacataaatgtcatctgaataaaagctctccttcctccttttttagaatactttatcagagcaacacaaaagatcaccagtgaagatgccagcagtgattagacaaagatgactctaaatcaacagagagaaccccatatcacataaggatttaaaggtattaaattcaaaccaacaaatgggaaagaacatatatgctatttgcaatgtacagatcagaaaacatcctataatttgattcaatacatttttttcacttgaaaccatgtgatgcagaaaatggcaatattttccagttctttggtatttcattggctactagaaataaagacaaactcatttcaatgctaagaacacattactgaaacatatgacataaatctagaatcatctttttgttctatttttgttgttttgatgattagaaaaggaggtaaattgcttattaattttacaattaattctttcccaatgattttaatttgtttgtgaatacaatgtgttatttatttctgtaaattacttttattgaatgataagcagaatcatattcttaaatgaagcttaaagcccaggaaaggtcaaactaaacttatatgaaattttccatcattataggcaacttgcttttccatccatttagttaaaaaaaaaaacagttctccaaatcccatggaatccccaaatccatttcaccacttcccacaatatgagacttagtctcagaagcagagaaagttcagagcctgtcccttatgtctataaagttacagactgtccactgaaacaagaaaaatagccaagcacaaggctcaagagactttagactggacagattattgatgggggatgtccttctgtatatatgtttctcttattggttgataaataaacactgattggccagtagagttaggaacatagccagggctaggagatgaggataattctggggagagaggcagagagaggccaccaggaaaagacatcaggtagagagactggaatattggatgcaccaggtgttttctggtaagataaggccacatagaaatacatagattagtagttatcagttaataatcaaaagagagatagccagcaagaaactctagccattggccaacagtttaaaaattaatatgtatctgtgtgcttacttggggctgagggtggtgggatctggtgggacagaaacctccatctgcagattatcaccaactaatgtatgctttttcaattccctacggtttccataaatctttacagagaaaacccaaagtctcactgtggggaaaatgtctaagatgccatccctcacactgttgaaagcaatgaagtagaaatatgtgtctggggtacatggttagcaacaggagattatggaaaaagcaggtcagtgttcatctttctaggcaatagaagtagcaaataatgaaaattacattaacatttcatttgcttttagttaaaaattcattatgagataataactaaataaaaccaagatggcactgtcccatattgaaatttgatctgctaagtgaagagtagtcccagccattgctatctggttctaactcataaggatgaagtatggctgagagactttgcttctcaaaccatcaatttgttagttattttcattgtttagagttttatatcatttgtaaaatttagtgaggatgggattatgttacttatttattcttgctttgctcaaaatcaaagagaggcctagataatgggcattcatttataaatttagataattagagttaagaatagtggatagagaattaaccagcttattaactgagcaaatacaggtggaaacagaaaagaaaaacaaaaagcatctctgtgaagccaaagcagtaggtctccattgcaaaggagaataggctttccttcaagaggcaattacattgcattcctctcccacccctcctcattgttgttcaccaggactgaaataatagattcatctgccctaaaggtagacattattagtttctcacttgtatcaaggaaagtttgcctcattaacagaagtctcccccatgctgtggttcatcatggttatgcacaaagcagaaaacttcattaaatcagctcttcaacattctcctcttacctcttcattcaggatttatgaaatgagcttacccaactccctcacctttgaagagtttacacagttgattagttcattatccatccattctatgtgcatattttcccatgaacatattccccaaatccacagcaaacaatcacagcctcaaattataccattgtgaatttgtctcgggcttgaaagctgtgtattgattgtcaccggtgttgtaaatgagggaaggacatcatctgtgcagcttttagtttctccagacagatttatgtcataacttcaatttatgtttggtgtcctgagttttatctaacttggtttgcttttctaggaatcactagctgatgcataaaataatgacctttgaaatgtgtttgctataacttagcaacagagcagcctggactttgaaatagatcttgaatggtaatcatctgtcattcttccaaagtgtgcatattcccttgcttggcataatttattaaatattactcattataatggaaagaaagaaacatagttctttacacatagtccacagactgttttttttgtgttgcaaagatagaaacaaacaaaaataaaaaaatcagaaaattatttcaagcatgaattcactgaaaaaatataaacaggttaataaaacttccactaaaagcataagtgatcatattttacaagtttttctattgcttgttaatctttcatatacaaaaacaatctggataacaacaattatataaatgtatgggttttcagagttcttaatacagtgatattatatataacaattcagcatgagactatccaggtctcagaattgtcaaacagttctactgctttgtacaatctattgtccactctagacttcagattaatctttataaaaatatcatgtttctctggcacagggtaaatgttaggggatccacagggatgatcccaactaagaatcctggcagtggtggtgaagatgcttttgatgcttttcccctataatgggattgatgtgtaccttggttaccattcctagcgccttcatccagtagctgttcgaagcagaaacatgcacccacagctaagaattgaaccataatcctggaatccatttgtggagaggaaggagggatgagcaaagggaccaagacggtgctgtacaaaattgcagaaacctgcagaaacagttgatctgatctagtgagggcatggagaccctagtcataaagctggggaaacagcattggactgaacaaagccctctgaatgtggcttccagcaaagaggccaagacagtctatgggatctctaacagtgaagccagtctttaaccctagagcacaaatcaattttgggagcccattcccatggagcaatactattacagcccagaaacagcaaggagggcctaggacctcccccaattgataggaaagactttgaaggtcccctgtggagggcctcactatacatggggaggttggtggggaacatgggtggatgggagggtgagtgaatgggggggatgaatatgtaaatatgaggagtaattaaagaatttaaataaaaatatcatatttctattgcactaaaataattatatattaagaattgtctatttagttctgtaccccactttttaactggattatttggtgttttggagactagcttcttgagttctttttaaattttggagatcagccctctgtcagatgtggggttggtgaataacttttcccaatccgtggactgtggttttgtcttgctgacgatgtcctttgccttacagaagctttttagtttcaggaagccccatttattattgtggatacagtgtctgggctactggtattatgttcagaaagctgactcctgtacaaattcattcaaggatatttcctactttctcttctaataagttcagtgtggctgggtttatgttgaggtctttgatccatttggacttaagttttatgcatggtgatatacatggctctatctgcagtcttctacatgccagcatccagttatgccagtaccatttgttgaagatgctttctttattccattgtatagctttggcttctttgtcaaaaatcaggtgttcnnnnnnnnnnnnnnnnnnnnnnnnnnnnnnattccattgttctacctgtctatttttgtgcagggatggtgatgcctccgaagttcttttattgtacagtgttgttttggctatcctgggtcttctgtttttccatataaggttgagaatttttttcaagttctgtgaagaattgtgctgggattttgatggggattgcgttgaatctgtacattgcttttggcaagattgccatttttactatgttgatcctacctatccaagaacatggaagatctttaatttctttctttaagactcaaaattcttatgatacaggtctttcacttttttggttagcattagcacaaaaattatagattttttttatttttccagctgtagagacagcagagcagtttggactggagttcagaccagggcacctccattaaaggcaagggatctacaaaggatggaactccatctcttggggtgtgatatctgctctggcatccatacatttctgcacctatatgtgcctacacagcaacaaacagacaacacacacacacagacacacacacacagtcacacaaatagatttaagactatgtatggaaagttatgatagttaatattgttatccagctttaaaagctcaagaaccattgaaaagcaaatctgtgatataattctatttcaaagaaaaccttaaaaagtgaattaaccatttcttatattaattttgtcagattttttttcagcaatgactcaaggaaacactagaaaggttaaatgaagttaggtgacatatgtgtgaagtaggcagtaccaaataaactctggcatctttcagtactgtaaatgagtacctctcccatgtccctatgagtcacctgctcatgattttctactatatattctctttttatttatcattgttggtctggtgtggggagagactaactcatatctactttgtgtttttgtacatcagggacaactttatgtagtcagctcttatatctagagacaggtttcaggcttacatggcaagtgcctttactcattgaaccttcttgcttgccatccccccaccacacctttctttttcttaaaaggcatgctgtcatcttgctaaattctcttttgcataacacacttgtggcctgacagattgccagtccattgaaaaccacattttttccattcactgagcatcagcttacattgtgtgatgagtctctcttagctttgtggtcctggataaaacacatgtgatactatttggaacaaagaaacacaaaggaaagcagaggaacactactcagttctcttcatgactcaatctgcagtcttaagccatttaccgactgtcccatgtcaccattgtcagggaagtgtgtacattcctaatgttgtctgcaagagtgactggaagatttccttcagattacatgggatgttctgtgctagtattaaacttggttctagttcatcaattagtattagtataaacagaccccaaagagaattttcaaaggttgctatgacaacatccagcctttctaggagcaaaagctatgatggcctgtttatatggcaaaaatacaaagatgttagactagaaataaaacagccatggcttgtcaatggaggtcctctattttcatctgcagcttcacagatgtgtctgatgttaaagacaaacatgcactttgtcttagtcatttatgagtattgacatacaaatgtctatgtactggatacaaccaaagagaaagaaacaactgtccttttctgaagcttctctttattctcccaattgttctgcatacacaaactccagagctcagatctgccagggctgtcactgtagatttctacaaagcatcattctaaaaaattagcatttaaatagactaaacaccagaacaaagactccctttaggtacctatcatggcctcggccttgcattctcttcagtctgcaaatctcagtaaaacttcacctttatctactgctttaattaaggaataatagaattttcctctcactttccacatgtcattatcagttcatttcatgttcaccttcagaccttatcacaaatccaacaatgaatatccttctaacacttgacatcattcttcttacttgacatagttgcccaactcccacccccatatatcatcctataaacaagcagaattcagaccaatcctggtaatagggaatgatgaagattccattttttttctggtctgaaatctgaagacttctcattctgttttgaaaggccaaagaccttacagtacactacatcccttatataacctggcttttgacccctccttcactttctgtccagctatgccatctcctatactttaaccagacatctgccgcaggctctttgccaccaggaagcctcatctctcacctagtgcttgctatccatctgtgtcttctagcccttctcatctattcatttttaggtgatgcctttgtaaaccagcctgctacatgaaaaccctctgagtgagactttcctttgagagcacacagtaccactgaacagaagatatacttacttatctcatttgatgcttacctagtactaaaattggtgtctgtaactcagtgtgtgtacagaaagtgtccacattttcatagaaacctctactgtaggatcattaacattccagaaacagcttttatatgggtatgcatgcatgtatcatctttatatgtaagtggggacatgtgcttgtggttgtggaagtctaaggtttcaaaggtattccttgatgactcaccacttattttttctgaggcagtatcacggggtgaacctggagtttgccaggatcacccagtctagctattagcttgcctggggtgttctccagctatgctttccaatcctaggattaaaggcaactgttcagcttttacagggcttctagggacatgaactccagtcttcatgcttgtaaggactccactgagcaatttgagtagtataaatggattaaagggttgccattcagattagtaatgtgggtagggatgcatactttgcttagaagaatggaaattctgtcattttgaataaaaatatatgtctgtctttttttgagacagggtttctctgtacagaaaagttggtagacaaggctttctttgaactcatagagatctgcctgcttctgcatccagagtactgagattaaaggtgtgtgccaccacgtcccggtgtattacaatttttaggaacagtgtcttagctttttctctaagtatttgaagcccatcaactcctagattttcttagatttacttaggaaatttggtgcctttatccttacataaaccaggagagtttctgtaagatactaaatgtcatgtcaataaggtgaaactaccattcatgaattctgtatttttcatgaagaactcactcctcctcagcataggggaaaaacctaaaagttcttaagttttccaaccatgactttacacccttttcttaaatattttacacctcaaacgaaaatgaatgacaactcctaattcaaagcattactttgtcaatttctagaatgagtttttattaaaaacattaattatttctctgcaaagacaatggagctgttttcttatataagaattcttatataagatataaaatcatgcaagtacaaaaaattcaaaattctgaatattaagctacatttccctgttttgtgagcttatactacaggatgtcagcatgaatttacttttaaaatatgtgcttggaaactgggatgtatctgatttggtacagtgtttgtctagtgtgtttaaatccctcagctcaattgccagatcctcagcatcacataaagcaggcatgctggctcagagctctaatgtaagctctggagaggtgaaggtaagaggatcagaagttcaaaggcatcctcaactataggatgagtttgaatttgaggtcatgacctgaaataaataaataaatggaaaatgtctctgccattataaaaaagaaaatgatgaatgttgttatggaaacttgatgtatcaaagaatactcccttttactgtgaaaatctatcctccatgtgatcattagctttactaaaaagttatggctcccttgatgacctaggtcaagctgattatctattaaatatctacatatattgcaaatctagtgcacagccaagtgttaaatgtgtatggtattgagtatccatttgtttcaatgaggaggttttcttcattgtctacattcatttaacaaatcaaagatttatttgagttgtttttatgtggagttatttattccagtattgtcagctaaggcatttatcttccctctgttcccactttcatagcaacaaagaaaattattcagcagtgagtgagcataaggtcataagaataatacatattatgtatagtgatattttggggtggagaaagtttggatatgttaatgttaataactgcaaagcactccatacagagcattagagggaggcattatcctaagttagtctgataaattatgactgctaaattctgctgcagaagactgagactagtgtactttacttcatctatgaaatttcaagttacaattgcaaaagcaatatcaaatccattctactcaagagtctgcatgagtcttgagttcagatatacacaggagatctcctatggtataatatttaaaaacaactcatcacaagatgtcttggagaaggccttagctaaaactaaaagggttcttaataatttggtgacttacaacaatggtatttgttgtgtcttcattactaaatgaatggctattttgtatgactcttttaaaatatccctaatgaaatttatgatgatatatctgcagattaatgtttactgggagtaacaaactgtatgactctcaagagtgttttgtaggattccaacacctgatctaatggttgtgagctcttgacaaccaactagcaggcatcacagcagactctacactcaccacagtaatcacctctaacttacactaaataattattgcatatctctctatatcggggttttcatgaactaaatgagaaatattgagtagagtaagtcattcaaataacatgaatttaatgttatgtttagctgcatgggtacatgaagattgatgataatgttggtatttagaatccagtgccaacacagttcaaaaataaatcatttacctcatcaagattatgtctatgaacctgcaaagctcagtgttttacaggaggaatagagaaccactgacagatttcctctatcactgagcaggaatcattcaataatcaaatcaataaatgtttatcgggggcagtagggaaccnnnnnnnnnnnnnnnnnnnnnnnnnnnnnnnnnnnnnnnnnnnnnnnnnnnnnnnnnnnnnnnnnnnnnnnnnnnnnnnnnnnnnnnnnnnnnnngattcaaaaatcaaatggacaaaggaaagatacagcaaggcaaggggagataaaaggttaaaaagaagaaaagaaaatataaacaaaacaggaagagagaagcagaagagaatacggaaaataataattggttgctacagagaacatgatggtgggtaaaatatatagctaccatcaaaagctggatttatttggaaaaatataagaaagaaaaagtcaataataagaaccagaaagccagttccataagcacaactaatgcgctaggatgggctcctgagcttacataaagtcttgagattcattttttaaaatgatattattattttattattattaatattattatatcccgattgaagttttccctccatcctctcttccagcccctcccctccacctcttctatcctccctaccccatctactcctcctctgtttctctttacaaatgacaggcctcccatggatatcaaccaaacgtggcatatcaagttgcagagagactgcacatgcagtaagcacctcccctcatattaaggctggacatggaagtccagaatgaggagtaggatccttgggacaaaagggtcaaatacagtccctattcccactgttaggaatcccacaagaagacaaagcaacacaagtgtaacatatgcagagtacttaggtcagtccttacatgctccgtcattgtctgttcagtctctgtgaacccctctgagcccaggttagttgattctgtgagttttcatgtggtgtccttggtccctttcgttcctacaatccataatcacccttttctgcaggattcccaaagatccatctaaagtttggccatggatctctgtatctgtttccatcagctgctcaatgaagcctctctggtgataattgggttaggcaccaagctatgtgtataacaaagtgtcattaagcatcagtacattgacatttgtgccatttgtgttgagttctatcctatgtaccctctgggtcctgacattccagtaagtgtcaggggtgggcaaggcatagatctcaggctgaaatagtaattggtgggccactcccacaatttttgtgccatctttgctgcagcaaaggaaagacaaattgtaggtagaaatttatgtggctgggttttgtcccaatccctcctcttgaggttttgcctgtgtacaagagatggccagttaaggttctatgtcacctatttccaggagtcttgtttggggtcactctcctagattcctaagagttaccattgcactagttttctactgcaccccaaagtggtccccttttccagtagtctttttaagtactctcctcacccccctcaattgacccttcctgatcacatccaaactgccttcaaagctattctatttccccttcccaaggagatagaagaatctccccttgagccctccttgttactcagcttctctgggtctttggattatagcatgatttttttttattttacagctaatatccacctacaagggagttcataccaggttgatttttctgtatctaagttaaatctctcatggtgacttttttctataccattcatttgcctacaaatttcatgatattgttttttataactgagtaatactccattgtgtaaatgtaccacattttctttatccatcatttggctgaagaacatctaggttatttccaggttctactatgagtaatgctgctatgaacataattgagcaagtattcttgtaatatgattgagcatcctctgggtatatgcctaagagtggtattgaggtagatggattctcaactttctgagaaactgctatattgactttcaaattgttggttcaaatttgtgcttaaaccacaatggaggagtgtcccccttgcaacacattctcaccagcaagagctgtcacttgtgatttgattttagtcattctgacagatgcaggatggaaactctgtgtcattttgatttgcatttccctgaatgttaaggatgttaaataattttctgagtgtttctcagctatttgagattcatttgctgagaattatttgtttagatttataccccattttaaaactgtactatttagtttatttacgtctagtttcttatgttctgtcatatgtggggttggtgaagatctttccccattctgtaggcatccattttgtcctattcacagtgtcctttgccttacagaagcatttctgtttcatgaggtcctatttgttaagtgttgctcttaatgtgtgtactattggtgttgtgttcagaaagttgtctccagtgccaatgggttaaagtctatttcccactttctcttctatcaggttaagtgtatctggttttatgttgaggattttgatccacttggacttgagttttgtgcagagtaatagatgtggatctatttgccaacatccaggtagaccagcaccatttgttgaagaagccttttcttttctgctacataattttgtcttctttgtcaaaaaatcaggtgttcattggtatgtagatttatgtcttgatttgtgattcacttaaaccacagaagtctttagatattttaaaggagtggaccacaagttcaaacttgtaaacatcaagaatttctatgatagaaatattgggaaaatcttataggattatgggatccaaagcttaaagaaacttgagagatgattacaaatcccaaatgtttgctgaagggcaagttattaagggctaatatattttaatgtgctctatgatttgacatgcattaaagaatgcacttgttaaagacaacaatcatatgaaagtacatataaagactgtcatcaacatgcccatgtaagaaaactgagcagtgattgcatataacttgccatttggctatgtaaaaggaagatccattaaagtgacacattctcataggcattctttgcaggaacgttagtgtcttatgaagactgtctcctggcctccaggcttaaagtactcccttcacaagaaatacaaatcacaatagaaggtaatttttagggatatgaatccaggctttggaatctatttgaaatatgctttacatagatatgtaggttcataacaaaattaaacacatcaaaggctagctcacacccattcttacaaatctgggtctctttcccctaaatctcactaaaaatgatgagtttgttcctggcttattggtgaagagctgaaatcttagacacttggaggcttagccagaggggttgcagtttcaaggccaatctgagttatgtagcagagcaagactagcccagataactctacacattccctgcctagcatatataaggccttgaatgaataccatattaccacactccaaaatgagtttgatcatatgatctcagcattgcttttctatcatgctcttgcctttctcttaacctactttttttgctatttgcagtgaaggtataagggatcatatccagagtatacactgtaaacataccctgactgagctccacctccagcccttatcttttcttttgatccatctatttaaaactttgtaattccctcattttcacacatgacaggctcacagggaatgacttagcaggtaaagtgcctactgagcaacatgaggacctaatttcagatcccggccatgcatgtaaaaactcaacatgaaggactgcttctgttacgccattcctgggataactaaaacaaacatatcacaggttcctgcttaccaaactagccaaatgtgcaaattctaagccattcaaacacctgtctaaaattattttttggagagcaacaagtgaacatacccaaaggttacctctgaagtccagaggagtacagacaggtgtatatgccacacaggagaacacatgcacaaaacaaaaaataaaaatatcatatttttctttgttcttattgaaacaaagaaccatgacacaataatctcagttgtctggccactctttcacaagaatgtttcccagaagataaataactagatttcactatctagctatttaaggggacttaagaagaagtggtacatgacttttatctcagctttcagaacacaagatctatatagaaaattctacaccagccagggatacacaggcaaagcctgtcttcaaagaatgtaaaacaatcaaactaaaacaaaaagaatccatcaattttgtattctttaagtagtctgagtgtcaaacaatctcttttaataaccaaaaatcaatttagaatggcatgaataacacctctctgctcacttggtaattatgacatgttgctgtgttgtccatcattttctgtgaggctcccacctctaaactagactctcctttttcggtatacagtactctttcagtttcatgtaatagaataaaaacaagaaagattttgagcaatgaccatccctactatttcctcatgaaacagcccccacatgtgtgaatggatggattgatggactaaaaagcagggtttgctgtaaacactattaacaagttctgagaggaaatcacatttctttactcaaagcctagaaacaattttgccactgattataataaaatactttccaagtttgtattcacctaatgttttattttacaggacattgtctgtcatttgtataggactttcatgggggacttcaagggcaccacctctctcagcactggtcactcacaccaattttcacctaattactctcctcatcccatccaatttaatgcctttcatagaaccactccctctctttccagactttcagcctcctccttgcctagtgtgatcaatagctctcctttacaaaggcctcaggaactggacttgctaaagtctaatagactcatcagatatagctctcaaatgttaaatgccacactgacattcaaaaattcatcttgggtctcacatcagaaaatgaagccactgctttcatagttcagcaaagcaaagttctccatagagacagggtgtgaaagctgcctgcttccaggtggcaatttcaaatctggaaagcagagggagatacacagttcagtgatgtcatgctaaatcccattgctttgaaataattcagaaaagggaccacttcaaccatgtctgcagcaaagaattacacttatgaatgcatgcagtgcccaaatcactctgtgttggcatatgtttataaggaattaaagggtcacaacactagaggaatgttgaaatcataagtggtagcagcacacactgagcctgtacagctccaagccagtcagagtcccagcaatgagagggggaagtgaatatggtctcccactcctcactgagaagctatctgcaactgaaacctgcttgcaaaggaaaactcaatttccttcaatggagtcacatttgacatattaacagctttaagtgtagggccctggcccagcagcagtagatggtcaacacaaaaagaactaagttttgtagactttttgtctggcattgtttgtttggacatttttctttcttattggtcttttccttgtatattatagtttctaagtttgtgcttttatgggctttgtttgtgtgagtgaatgtgtatgtgttgtgtgtgcatgcatgtgtgtgtatatagtttcttttgtgtgtttgtgttagtgtgtagtttcttgtatgtgtgtatctgtctagtttcttgtgtgtttgcatgtgtgtgtgtgtgtgtgtgtgtgtgtgtgtgttcttctggttggtttgtttgcttgtttgatggtcggcatgctttgtaaaaagagtcagagaaagaaaagcctggagtatagtgacaaaatggggaggatctggggaagagttggggaaagagcatctgctaccatgatgtattgtatcaaaaaggatttaaaacatttttaaaatggaaaaacacacacacacacaaaaagaaccacagggacagcagccccttcaaagtgtgggatagtgagatagcacactttggtgagatttaaagatgctttgacatatgctcttttctgtcatttaataaatttatccctagtacaccaatgaactttgggagtccactccacatagagggataccctcttagcctagacacactgagagggtttaggccctgttctaaatgatatcacagactttgaacatccccatggaaggcctcaccctccctacagagcagataaggaatagactagggggttggttgggggcaggggagaaggggaggaagagggaactgggattgacatgtataacaagcttgtttctaatttaagtaaacacaatttaattagaaatatataaataaatgaaatcaatgcaactgctaagcatttgttttcatggcaataactcccaagagaatgaaaacttttaaagacagagaagtcatattcctcttgtactaaagatgcctagtgctgaagtttattttactcactcagcaagcatttgctcaaacaaggaattaagctaaaacacagagtgtctgtatttatcagggctctccataggcatacaacagggttctctcagagatttactggcatttcttacatcatcttctgagtagtccaaaatggttgtctcctgatggaaaggccaggtagtagtagttgttcagtccatgagattggatgtctcaatatccccaatttcataatggagtctccaagaatgtctagagacctgtcagtatttagtctatattgaaatcctgaagaaataggttctaatactagcaaatgaatgcctcaacaacagtatatatgaactttctggtgagagtaaggaaagcaggcaaagaacaaatattccttcattcacgtcattttatgggctgtcagtaagccatgtggatcagctttctagtctatcagtagttctcaacctctgggtctcatctgctttggcaaataactatctccaaaaacatttacattatgattcataacagtagcaaaatcacagttatgaagtagcaacaagagtaattttatggttggggaatcaccacaatattaggaactatattgaagggtttccgaattaggaaggttgagaaccacaattacatttttctgacctcactcaaatgactcagtaaagaaaattcaacacagaaatacccagttgctgtgacaggcctgaacatatggatttttgtttgctcatttttataaatgtgggatactacagtgtggattggaacagtggatgaacaggttttaacaagtcatcctaacaggagcttggaagacaatagtgctgaaaaccatgagcattatggaggccctgctctaaaagtttcagagggagcagagatagactattcttgtgggtgcttttatccttttaataaaacatacaagcccattggattttaggatactgagactgaaccagaaagttccaggcacattccttgatgtcttcttcttctacagttcagctcctcttcatccctgagaatggaattgcaatgtaacccattgaagaggaagcctggtttgcatgacagacttcgcagtgtcatacaaagaggctgcatagccatgccgaatgttcattgttgaaaatgagattttaatttttccttgggccaaagcatattaaaaagcttcttaaagagtttgatgagtgaaaataacgctgtctatgtaagcatgtcctcctgaggggataactgagtaggacattctaacaggaaagcttggggtggttagtccttgctcatgcctctcttttctttattccctccctgttgctctatcttttaggactcctggtctccatggtgacaccatataaaaatctattatcaaaactctcaaactaaagccatgtttcccccacaggagattacatttcccagaaatcaaaatctcaagctacaggaagcaactgcctaggcaggacgtcaagcatgtcaaatgtaccaattagcctcttaaaggagctttgtgaaagaaaccttctccttgacttagcagaggaagaaagtgaagatagaaagaagagggagactttgagtttcttcaaggctaactcttttgattgcagtacccagggcataggctgacctgagctattaaaactaatagtgtagaaatggacactaggaaccagatgctgccagataactttttttcttttacacaatgtttcttttgttctatatacagagacttggtgtgtctgctctgataattctttaactgcatcctgaatcagtgcttggtatatgcccgaggtagatggacactaatctagcaattgcttcaaagatgctttttgagtcttatttttgtattttttcagaatttcaatacatatgcaatatactctgtacatattctcctactttatgctctcatctcctttttgctttgctagagctccctttctccaacaagatctcttattttcatgcttttacttatttgtttgtgccctcggcatcaagggcatattaccagggatatacccctcagcaaggattaaatatcattagtgtcacagggagatacaatgcatttggttcactattcactgcatgatgaaatggtgatgggctcaaactaaaaattacaagaaatcagcaaatctcttaaagaaagcaaggaaagccaagaaaaaacaatcaaacagattaaggaaacaattaaaacagttcaagacatgaaaacttaaataggcaataaagaaaataaaaactgagggagtgctagaaatagaaaagctgggtaaatgatcaagaactacagatgcaagcataaccaacagaatacaagagatggaagagagactctcaggcgttgaagatacactacaggaaatagattcatcaaccaaagaaaatcttaaatctaacaaatctctaacacacaatatccaggaaatatgggacacctttgaaagattcaggcattatgctgtcctgcccctgttacctggcagaatccactcagcagtaccctggtcagcccagggttcaatgggaactgagtctgcacacatgtgtagaggatccctttaaaagacagacccctgcccacttacatggtcgacctctctctcctctctcttactctctgcctttctctgttcttccatttctctcccactcactttcctgccctataataaactaagaataatgtatttcttgttctcatgtctcatgttgcacctattttttctaatttaagcaaaagaataacaatggtgaaaagaccaaacctaagaataataggtatagaaaaaggtgaagaaactcagtgtttttatagacttcgtacaggtggccactgctactgtttgagttcaagtacaaaagccatgtgatgtccatttcttaagtttctaccaacatattttatcctagtgtaaatgagtcaagaggggaaatagcaactattcatcttaaagagcctgagttcctagttttcaggatgtgaaaactggcatttacatgttagcctgagtatatgttgatacacacaaaggtgctgttttgaggagaggttaatcaattagggaaagctaattaattccttattgagtaactggtttgtgttatttttgagttgttaatacaaagaaggcagctggcattgggtctatcctcttttcttctggtgtttccatgcttgtccatggtggtgcagtggcccattcactgtctttcaggatgtctcaactctgaggttgatcaaacggtggagtccacactattgcaaggaaatctgttgccaaagctagctgtatttctctagacaaggatgggagtcagctcagaattctttggattgaggatgcttccatctccattttagtcactgttcctcagttgtgaagagacaccataaacaaggcagcttaaaagggaaagcatttacttgggggcttgctttcagtttcaccttcatcatggtatgaagcattgcaggttctggaagagtagctgagagttcacatctgatccaaagagggcagggagaaagactgggtagaatatgtacttttgaaacctcctcaggtaccacattaggtaagaaaagaaacaattgcttcaatcatttgtttgaagtaggatttgcaagtggacaccatggcattaacaccccacccacatacacacaccacaaagacaactgcttaaatgaacaaaataaataaaatatgtaagtatagtcttttcaaattaaaatcaagatctttctaatttgactgaaggtttgctcaataggagggaattcatgcctagcattgtaaacctggctaactactcatacttggagaagctgtggatccaagaaagaactcactcactgttgctacatattttctaaagttattcttaatgcttatccttaaacctacaggtaagtgttggccttgcattatcaaagaagtttctttatttgcaggagacagagggtagtactacagagagcaacagctggttgagatgctgagaataagttttcatggtgtacccagccccaattaagcacctataatgcaacccctacatctaaaactcagggaaaactgtggaagatggcatgggaagactgtagaggacagaaggccagcatacttaataagaggtaatgtcttctagacacgaccagaataccagaaacaccaatgaaatctcagcaatagtctcctaaacaagacttgtgtaatgaaaatacctgtcaacttgccaacatgattggggaaaaccttactattcccaatctcttgatgaagagctacacagttagttaaagactaccaagacagggagaatcagacttccccaaggatgagtgctatgacaagttatgtattctcagtggtcattcctaaagccatctttatgagtaacactgaatcagtagattcctatgcaaaaggaagctaaaacaggagagggaatgggaatgagggagagaagacctagagggggaagagtggtagaaatacaataacataaatatagcatcgatacatgggattttcagaaatacataaatccatagaatcatatgagaaaatggaagaggtaaaataatttctaagtcttctgctcatatttgtgattagttcaaaattgggaagtttcctaaggctgtgaaatttcctttaatagtgaaagtctaaacatgaattgaaagatgtagacttctgtagattttcccaaagaaaagatccagaataaatttgccactgactagctagatcagctcttgatattcatgtgaaagccacagtatttttcacctttcaatgagccatgattgaaatctgtgtgtgtgtgtgtgtgtgtgtgtgtgtgtgtgtgtgtgtgtgcttgtgtgtgtgtgtgtacacacgtgcctctctcctctctttaattctctgtgtgtatacatattgtatgtgtgtgtttgtgtgttgtgtgtgcacatacatgaatgcatgctcatgtatgcactgtgcacagaagaggcctgatagatgctgctgacatgaaaataagaccgagaggtagcacaggatgagtccaataaagcagcccagtggagtcctaacacccagatacatccccaacaggaatttaaagcatcgatcaacataaacacacaccaggaagcatggaataacaggataatgtgtaaggaaaagacagaatgaatattacacatgatgccacagacatgtgtgaaacaggctttcttttaggccaccgacgagctatgaaatcacgatacagagacttattagttatgaatttttggctttatcatgtctcttattttaatctgtttttctttatgttttgccctgttttcattttgttttgtgtttaacctttatctctgtatgtcctacttccctgttttttgtgtctgtcaggctggtgacttcctggcttctgacgtcaggtgtctctctgtctccctcattttctcttccttcttctttctcaaggctaaatttcttctcctacttattttctatgcctgccagccctgcctgcccctctaatgcctagctcctggccattcagaactttattagaccaatcaggtaccttaggcaggcaaggtgaaataaatgtaacacatcttcacatcattgaagaaatgaaaatcttatttattgtgacaatatacatgtttattaaagatgtaattcatattaccaatctttaatctcttactattagtagacagagccaataactacttagacatacttgactggagatatttaaaacaatatatatgattctaaggaaaatgttataacataaaatttattttttacataaagtacttttgccattgctattagaattctgcatgtgtttggtccaccatcccaactgagttttgtaattcaaagtttgactccactctacacagattacagctcaacattccatgtcagtctttataaaaaaggaacttctgtagataggcaatgtcagcagtttaaaacccaaaataattctaaaccctggtggaatcctataatcagtgtattgatgaggaaaaccaaaatcacaatgtcacaaatagcagcagtgagcactttcccaacacaaatgtctctgagttcaatactcagtattacaaaattcagtacctatgaccaaagaattgtgttattctacataatgtcacattagcttccaacttttaaaagattctaagtctaagtgttttgtagaacccctcagtttgttcaaaatggtttggtttatacttgtgactgagaaatacttgcttatgaccaaaacactggggaaatgttcacaactagttgcagttatcgaagttaataaacacgagagtccttcaaatctgctttcaccctcttttcttattatatttttctttaaataaaatcatgcttctctatcacttctcatgtctacattttgcttcacattctttcatatttgtttatatttctaaagccaactcaatctctctacaggtcaaatacaaacacatcttatattgacatcttcccctgatacacccactttctgagactatgttttatttatccacactgtacagctctgtaattttccaccagagcatcttttcaggaaaccacaccaattgtgtccaatgttagcaattcttttgagtgagcctgaggtggcaaggagaagtatacagcttcgtgggtaacaggctacaaaaattaagaggtttagaggaacctgtcactgacgtggatacagaaacaggaagagaaggataattttttcaagacagggtttctctgtggctttggagtctatcctgaacctagctgttgtagacaatgcttgtctctaactcacaatgatccaactgcctgtgcctcccgagtgctgggattaaagaagtgtgccaccactgctcagacagaaggataatatcttaatacatagtcaaaaacttaaaactggccatgcccagagtaagaaaggcagccaggtacaatagaaaatgcccaacagtctaaaagagaagggagttttcacagcttctccattgacttcacactgtgtcttcacattatcttgcctctagggctgtgtcctaaaatcctatcaagaattatgtgttgtagatgctataattaatgttacatattctctctctctctctctctctctctctctctctctctctctctctctctctctctcttttgtttcagtaaatacctgaatctggctttcacccttcaatcttcctacttcaactttcagagtgctggaaattacaggcacatgttaccattctcagcaatgttatgctttaaagttgaggaaatttaagataaggtgagccaaaacccttgtcccatacttcacagtttataagtttcatggttaggtgaaatctaagctatctaccatatgatgctctgttagatttcaagattgatgctcttgagcaaacaaagcataccatatccacgaatgactccaggaagggacctaactagaaataggtaaagaatgaaggaacgatagagagacacatggactgacagacagaaaatctgtgatcagctgttctgagcttattcctggggaaaattccagcaccccagaagctcagtacatttattttacagagttgaatatagagacagggttagtgctgatgtaggatgtattttctgtatgctcttagtatatgttgctctcattggttgataaataaagctgctttgacctatggcaagacaggatagagctagatgggaaatctaagtagagatacaggagaagaagggtggggtatggaaggttcccgtagctgcccaaggagccacataccaaagcaccaccagtaagccacgggtcacatgataatacacagattaataaaaatgggttaatttaaatgtgaaagctagttggtaataagcttgagccattgaccaaacaattataattaatatcaagcctctgggtgattattttataagcagctttagggacagaaggaaagagaaaccagtccagagggactgagaaagacagagaaaagcctccagctacaattgtctcaccaatgtggggatctcatatttccatagggtctcagaaagctaaaataggtggggttctagatacataaacggagccaaaatgccttcttaattgtatccttcatccaggcttgagcacagcaaagtggattcccacaacagattccaagccacaccatgctatttggtggattcaggttttactcatacagacaagaaatgtttagaggccagctgaatgctacctaatgacagcactgtggagggtaagtgtaactctccttgctaaatctaccatgctgaaaagccaagcaggagagaaccaacaggcaaagcagatgctttggtcctaaccaagccacttaacaatttaaaagatgttatgtactcactcaaaagtggatattagacataaagcaaaggataactatcctacaatccacaaccccagagaatctaggaaaggaggtccctaagagagacatacatggacaccctcctgaggaggggaaaggggcagggtctcctgagcaaattgggagcatgggagagggggaagggagacaggagaaagaggaagggagaaggggaagggaaggagaacatgagggattagtaaggtcaagttgggggaagaacagagaaggagagcaaggagggagccattataggtttaactagaaatctggcaccagggatccataaggatgaccccaaatcaagaatgtaagcaatagtggagaggctaccgctaaaatgagattgatgactaccttaaatgccagcatagagccttcatccagtagctctccgctaaaatgagattgatgactaccttaaatgccagcatagagccttcatccagtagctctccgctaaaatgagattgatgactaccttaaatgccagcatagagccttcatccagtagctgacagaagcagaagcagagattcacagctaagcactgaaccgaactcctacttgagttgagtgatggctctgctcaggcccaaattctgccatccactctttggaacttcctgggcctgatactcatatattggacacacccagcaggatgaaccacctagagtctggccacacctcagtcttgccccctctgcaccctcctccctctgtttgatgtgagtgcgggctctgctaggggccaaactcccgccatccccccaaggacatatttttcttatactgtatataactttctacttttgtttaagatatttttgcatattaatagaaatttaaggttattgtcttatactgcatatttgtttctatttttgtttaaggtattacctatacagcccatacctatacaacttatttaattatgcaatatgtgttttagtcctcaaaagctgtttaggataacaaagaattacaggctaatagttaatcatatctgtaaggattcaggcattatgctgttctgcccctgtcacttggcagaatgccctcaaacagcccgctggtcagtccagggttctagggcaatgtagtctacactatggtacaaagaacgcctttaaaagaaacatccctgtgcacttatactgtcttgcactctctttttcctgctgttaccctgggataggcaggacttttcctgtttccctcttctcttctgttctttctttgcctctatgtctctttgactcttttctccttcatcccaactttccttttctaattaaacttctcacttaagctctgcctggcatgtttgtccctcacctcaggcaactttgtttgccatggaatccactaagtttcccctccagctttatcataacaatatctaacaaacttaaagtcatgtaagttcgattttcaaggtaatacagagatatatttcagatagataggtaatcttaaaacacttcaaagacctacacaacgtggtatttaaaatgtttttaaaccttacatttttcttgacaatgagataagtctgctgctggcagcaccaataattcaaagaggatgatgggtattgaagaaactccttatggagtttactttcaatgtggcaaggctagccatttggtcatgaatctactctttcctggactgcttgatagtatgctgtataaactggacatgcagaacccacagaaaaatgaccactgaactttgccaaaacaaggtgggatgttccatcaggcccctgattcacagaagaaactgttggacattatagaggaaacagaggaaagtgactaattttgccaataaataataaataagtaggtcagtccttcaaatttcttgtttcactgaaaagtctgtcagaaactctaggtctataggctgaagatggatgccctgacattgcaaaggaactttggtgaactgtctaagcagccccatgtctctgtcatttccagagccttggaagttgcttgtaatgcacttccttcttacttagataacattatatccttctggggttttgatagatttgaagaatagttataatcatagttttccttaggcatgataaaagataaattaaatacagaacttgagactcacaaagataagataaatgatagactattttcttgactttttggttataagaaaggagtaaatgatatgggatgtctttcagtacattgtgaatatgtgttcctcttattggttcataaataaagctgttttggcctatgtcaaggcagaatagttccaggcagtaaatctaaacagagatacaggagaagaagggcagagtctgtgtgatgccagcagccacccaaggaatatgccagagcacccacaagccatgtggcaatactttgattaatagaaatgggttaatgtaaatgtaagagctaattgataataagaatgagtatttggccagttataattaatattaaaattttgagtgattgttttataagcagctttgggaactagtggtggaagagaaaacagtataggaggacagagaaaatcctttggctacataggacacttggctgaaaaaggaagcggagttattacatacagagaaatatgcagataagcttattgtagacagttggctcaagggtacagatttaggtagttttgctaggatcagcccccctagaagaaaagtcttcaaagtagaaacataggtaggggcagttacattggacattatctgtaccattgtcaatattaccattcagttccccatgcaaggttttggcattttcctgtgaacgtcaccctcctgagggtagggatggtggctttgtcattcctccatggtctgaaggtctctgtatttgaaatggctgtgtctatgtaaacagtacacattcactcagaacttcactcattcaggccttcctccctacagagagaatacacaacatcctcttctaaggaacatgtatataataaagccttactgcatgtttacttatgaaatgaaacccttgttcaaaaatgagctggttaaaaaacagaagctctcaaaagagcccatgccaaaatcacagtttgtgtctgtattctttacacagcattttacatggcagataaaatatggaccttgacactgggagattgacctgagttacccttctaactcaagacaaccataggagtccttatacttgggaagaaggaaacaaaagcagctcatcagggagatgcaatatgagtagttagttggtggctgataaaagaggtgtgccaagttatactttcagcctttagcagaatagcatggtagaacactgggttctcctctggaatctctacaaagggactgctgccaacatcttgacattaattagactagtgaggcccaaatctttcagtctagagacttagaacataatgaagttattgcttaaatcaccaagtatgggataattggttacagaagacataagaattagtacagaggtaaagctttaattagaaattttaaaaagaagggaggttaactctctactaatatattcagctggactaatgcttctaaggcagggaaaaaaacaaagggggtggcaatattcttgtatatgaaaacattaggagaattgtggatagtccaagtataccctgtgagatatttcaacagcccaggaatttccagtgtttatagtgtcatcctgaagaactaaggaagttatcccaaggaaattaacaatagtacaatgatacagaacacaatttctactgaagctcagtataggtgaccaattatattactaatatattagtcagggttctccaaaacaacatcactaatagaatactgaatgcatataaggaaattaattagattggtttataagtatgctatcctgctagaccaggaagggttgcttcacactggagacatgagaatctggtagttgttcagtcctttgggctggatatctcagaaatcataattggacactaaagtcctgggtgattcttaggggtatgctgcttctagtatttgagaaggaatgtgatagccacaagataaatgaacttgccagagagagtgaggataaacacagtaagaggcaaaccttccttctataatgttcttatacctgcatgcccaccacaaggtgctacttacatttaggatggaacttcctgtttcaactatgttgatgaagaaaattcctcatataattgcacagcagcttttgttttacttaattccagatacatgcaagtttacagtcaatactatcaccacatcacataatgaagaatgagctgtattttaacttgtccctagaggggaatactatcaaccatttttttttaaaggagggtattcatattgatcagttagtttagtagtcattttatttttttcctccgttttttatttaaattagaaacaagattgttttacatgtcaatcccagttctctctccctctccttctcccctgccccccactaacaccctacctgtcccatacaatttctgctccccagggagtgtgaggtcttccatgggggtgtcttcagagtctgtcatatcctttgggatagggcctaggccctgctttatgtgtctaggctgagggagtatccctctatgtgaaatgggctcccaaagtccattcctatgctaggaataagttctgatctactacaagaggccccatagatttccaaggcctcctaactaacacacacattcatggggtctggatcagttccatactggtttcccagctataagtctgggggccaagagcttgggtttcaccagccagagggagtcttttttttaaaaaaaatatttattaatatttatttaactattatgtatacagtattctgtctgcatgtatccctgcaggccagaagagggccccagatctcattatggatgggggggtgctggaaattaaactcaagacctctggaagagcagccagtgctcttaacctctgagccaactctccagcacccccccagtagtcactttaaaagagagatatttaagacattaagaagatattcaattttctgatactttctttggttattgttggttggtgtttgtttcagtattataacactagtgtgggtcatagtccattagaagaagtgctagactacatttaattaacaagtctttctatacctctctggttttgtagcatttgagatctctttctctctctctctctctctctctctctctctctctctctctctgtgtgtgtgtgtgtgtgtgtgtgtgtgtgtgtgtgtcagtgtgtttatttgtatatccatcttcaatctatcaggtagttagagatcatctatctacctatcatctatatgtctattatcaagtattatctttctgtgtatccatttatatgtaaattatacaaacaaatagacacacacagacattacaaataacatatccacatacatagtcatacagagaaaaagtagaatccacatggtagaaataaggtctttattacacccagtagactaaagatgccagtgtgttgaaaatgtcacccacaaaattcaatgcacactcctgaaaattatgtcacgtgttcttattttgtttttctgtagctaagacttctatgcccttctatcatggatgttatcatctttctaatactttcacacatgtcatagcagccctcagtgttcggttcctgtttctcaccctcctattatatcagccttcatttcttgttctttccctgcagtttttctaccctctggtcacatactagattcctcacaagtggaaagagtttcttcatgtataaaagctttcttacccgaacccccttctctgagagtctctttgagttctcaatctcaaattcttagaaccctttcaaatatcaaatcatttctgaactatcccttatatcatcctctaaagcctacatcaatactcttcctctttgactcccacaatcctcatatgctaccaagagacatggacctctccacttttacctacaatttttgacttgctagttttaactgtgtctgccacccaccccaaaaagtagcaggaattcattttcagtacttttctctgcacatatttgcctcaaacagtatatcttacatatatacacacaaaaatacaatttttaagatgggccaaatttaattcatttcctacaatttttgtgcattttatttttcttacctactttctctggccagagtttaggaacaatgctgagaagtagtgaaaagggtgggtatctttgagtggttcctaattccaaaggaaaccatccagcctttcaccttttaggataaacttaatccccagcttgtcctgcattgtttctgttgtactaaggacttttttctattctgaatttctgaagacttttaagataaatgggtgttgaatttttttgtacctactgaaataattatggggcttttatgctttacttactatgtacatctttaagatatgttcttatataattatgttgggaaagtattctagaactctaagagtataattttagaattatgacttgtgagtgatgagactccagaacctattcatattacattatacaaacctgaaatttttcaaatatgaatttgctgaaaactttactttattgcagagacagggggtgtccacatcagctggactggttcacatcctcagcaagtccagggctcaaagtctacttagaacagcctgtagtcagcaactgatactcagatgtctgccagaagcagaaacctgtttaagacatgtttaaactaggaacagaagttaaaaattatttattgaagcccacagtgcagaaaaagcagatatctggatatctgttctaacagcaggaacatatttataattttgagtcctagcaaaaatacagatttgggctataagcatgtacatttttcttctgtccagagagccaggtatggattggacagaggtgcctttggcttgatgaaaagccctttaagtttgtacttagatgacaaccaaaataaacttaaaaccttgaacttgtgactgaacagtacgtagccattactttatcagcaacatgctgactatagcctatagtggatctgactgtctgatgctgccaagttgacaaccattaatacttcagatatctgagaagggtatattctatccgaatctactaaaacgtaacagaagccagtccatatacagttagccacacccaagtttctccattaccgctggaggcagatgtctcaaagaacatgccacactgtctgccaacagcccctgatggattccccattgcctaaattccttttttttgcttttgactagcatttcaaccttttggggtccctaacttcgtcccaaagtcagcaggagggtccctaactgcatcccaaagagagcaggaagttgcatgggaaagaattcaccacccattttccctggttaaaatgctaagtcagaaacgactcccttgcattggggcactagagagacagcaattccattattggaatttaaaaaaaaatggaggaatgaagggaccagacccccatttcggcagccatgacagtaacacgtgcttgctatgaccttgtcttggttattaagaggtcagatgcctgccttgtggcaaggagccaatcagaagttagctggtggtgctatgctttatggctctgggtgtactttatggacaagtacacagcaatgacgcgcagggcatagcaaccaccctgggagggcctatgggccataacaaccaaatggccgatcaactcaaggcaagtcctccaagcctggaggcacaccaatcctgagcctgtgcgtacccctagacactccccttacactgccttacaagatcgttcagcagccggttcgaggtgtctttgctagccatccaccatggtgggtgggtaaaagatccaagctaacatggggttagctcattaaaaaacaataaagcctcatgctgtttgcataaaaaaatttactttattgatttttttcttgaaacaagttcacctatagctcaatttgggcttgaacttttgtgtaatgaaagatgaccttaatcattgatcatagaagtaaaattgtagcaagtaagtcaagatttgtattaatatttttaggttgtgtaactaaattaatgaatttagtttatgcactgatataatgactcaagagagcttttggtcattatgaaggagactggtttggacctcagaatgtaaattggaagtttgtgctcttctcacttcgcccaccaatcctgtatgccttgtaaatatccatactggacagcagaatgattctaggtctgtactcacactgtttggacatttcaaattatttctcttctacacaaaaggagactaaaatgtaatgtttgtaaaattttggagatattgtgtctgatttaatataatgtaaatgccatttctataaactaaacacattttattacctgagttattgaatacttgttaatttcaagatcattagtaactaccttttttaaagctaattgatgtatctctaatttaacctcacataatttctcttctcatttttgctacctaaaacaatgcatgtatatatgagtatttatatatataaaattgatgctcatttagtgagttcactctgctaaacttgtctaccaataccattttattgcagcaaatggaaatcatgtccttcttcaagtatgcttctagacaggcatcagtgaaatcaactgttaataggaaggcaattttttatgttacaagaaaattatttagccatctcaggataaaacagcaatgttttgtagtttagaaatatttttatcttatcagatcatggctgtaataacccacttaactaagctattgttgacttgaagaccatgttcattaatcaggagcccaagatgattaagtcatctatcaatgctgatgctggctggatgtatgaggtttcttgttgtcttgaccttggtgtgtcagatgctcagataaaaactgtgatagatctgggagcccatcctaactacctccaggccagagcagcccagagtgctcctaaggagagcaatatatttatccttctgctttcaatcatcttgagtttcttccataatatgccacttctgtcccaacactcaagctgagtttgttatttcttgtttatatccccaaagtcctttatagttgtgtctaatatggtccttagcatcatgtgttgcagacgtgtctgcctttgactgagtgatttcttcagtgtcttaggcagttttgactctcttcacctaatctcacaaatgccatagataagttatgaatcaaattaagtaattaaatacttttctctctggtttctcttgagattttgtttttacttttacttgtgtgtttatggttatggttggggctgtgtgtgggaatgtgcatatgagtgtaataattgtgtgtcttaatccctattctattgttgtgaagagacacacaaccacggcaattcttataaagagagcatttaattggggactagcttacagattcactctttgtccttttttagacattgctctggaaaagtagttaagagttacatcctgttcttcagacctagagagagacaccggacttgacatagaattttgaaacctcacagcccacctccagtgacactacaacaaggccacaccccaatccttttttgaaatagtgccattcactggtgattaagaagttaaatatatagccaaaggggacattgatattcaaactaccacactgatggagccaatagagggaggtaaaccacctggagctgtagttaattgtggttgtgaacaatttcatgtctggatgctacaaacaaaaacttggttctctggaaaagaagtatgtattctttactgctgatacatctctcaagccccctttgtctgttttaatgccactaatagtaaatattgatagaagaattgtgatctccaaattataatagaaagaaaaatgttattgaataacagcatgtatcaacaaatacctttgaaaggtagtcatttcaccatatttaaatgatataaacttgtctagttgtatcttgtcatttgagagcagaataacttctggaaaacagtttcattcttccatcagttttctcaactgaaaaatgaaatttttgcctggattttaagaaaactaagctgatggaagattagttataaatgttttgtaatctgcaatgtactgacaaagaatgttttttggaaaaacaattgtctgacaccaaatctgtggtggcaaaaatcccatgaaatctctcttagcaagagccttccacaggtattgatgatgctgacccactaccacctccatatgtgctggcaatgccctcccattgccaccctccaaatgtgctggtagtgtcctcccactaccaccctccatatgtgctgacactgcccaactactactgctctttagatgttctgacaatgctcacccactaccatgcttccctaccaatgatgacaaatcatccttgcctgtccagcaagggtttcattgactagcccctttccctttacctctgctgtgatttttccagaaaaatagagaggaatgtgtattcaccttatgtagtgtaccaatcacagaagaaaacaatgattctgtacaagcctagattagtgaatcagtgagtttattgaggttacttacagaagcattgttgagagatctcttacagtaatatggctgaaatggttatttataaaagcagcaatgagttgagcagctgcttcactggaaaaaccccaccaatgtgagtactcactcatgaaaacagggtttctggtgttgcctatataattttcaggtaggcacatggttctcctatccccaaactgttatcactgctcatataatcttgtgttctcttgtatgcttgtaactttcttgagagaatgcctccacttttcttcataagggagagtttcagcatgaagagaacagctgcacacaccacctctgataatccttctgagtgatttaccacacactgattcccgctctgctccaaggctataatttttgaacatagcatgctatattcggagctcagcccagttttatactaagatatgtttctctatagcattggctctgaatcaagcctttatccagattaaactagggagaagatccatgcttggtttctcttcaataacaaatgaggaaaggaaggctaccattgtgttgttcaaaactgttcatcatgtcagaataaggttttcttctcattggttaactacacttacaagtttcatggctggttatccctcccttttggaacaattactttttctggccacatccaccttggtgctcctccttggattctgaggcagtaccaccaaatatctttgaccccttaaaggtagagctggctgttaactgcccatcatcttcctgcctatgcctgtccttgaaaggaactcatttactttggtaacttgaaattcttcctgagtctaacaattcctaaagttctacttcaagcttcaatcgtccactaaattcaaatttgttcacctatacaacatcaacatctggcttataaatggaaccacaaacttattatgtccaaaactaaacacctgatctgtttctaactctcccaacttctgttcctgaagacttctcagacaaaattagtgtccaaacaatttagactccacccttcctcctacactcacatcaaagatcaatagaaaatcctactctttggtcagaactatcatatgtggctattctaacccatcttctgcatttgtgttcacccttcaggctactatcatctcctgctttcatttttattgcaactttgttttttttgttttctttttttattagaaaatctcaggtccctctctctcccttcctcccctacccccccaactacccattgttacgataaatctttctgccaaaagccaccgagccccaccgccacatgtttgctttatgcaagcttcccacccgagttagggcccaaatgaatacacagaaacttgtattatgttcaaagctgcttggccaatgactaggattctcatctactagctcagtctcatttatcaaaaatccatatattttataagacttatcttatcggatgccttattggcgtccctccttgctggtggatcacatcctgccactggagcaggagcagaggggaaaaaaaggggcccttcctgtttctccttcacttaaatatgagtttccttgctatgtcacttcctgcctggatcagcacttctctactccatctcccagaattctctttgactcctagtcccgtctacttgctgtctcattggccaaacagtattttatttaacaatcaataagataaacatacacagaagtactttccccatcaacccatcccacaagctttctggtccccaggaagtgtgaggccttctatatggggtcttcaaagtctgccatagaggccaacccctttgtgtctaggctcagggagtgtccctccatgtgggatgggctcctaaagtccattcctatgctagggataagtactgatccactacaagaagccccatagatgtccaaggtctcctcactgacacccacattcagggcatcttgatcagtcccatgctggtttctcagctatcagtctggggccaagaggtttcccttgttcaggtcagctctttctgtgggtttcagcagcctggtatggacccctttgctcatcagtccgccttctctgcatctggatttcagttcagttcaaggtttagctgtgggtgtctgcttctatttccaccagctgctggatgaaggctatatgatggcacatgaattagtcatcaatctcattatcaggagagggcatttaaggtagcctctcctctcttgcttagactgctagttggtgtcatctttgtagctttccagacatttccctagtgcctgatttctctttaaatctataatatctccctcaattataatatcttttatattgctctcttctattctgcccccaactcaacctccctgtcccataatatcttcctcactcctccccttctcattctgctagttactttccccctccccccatgcaactttcttgtagcagttttttaattgttttttctgcttcaatccttttctagtacttgtgaactcacagagctgtgtacttcataattattaaaagttaagaattttaaaataatattcaagtccctgtgttcccagaaaatggagatggtgacctctgacttctaccctgactctatccccatgtcttcctttatttccatcacactacttctcaactatatcatttatatttgagccttggggggcctggattatcttccctctacttgaacttgtgttttgtagtagttttctcccacataaaccattccatcttggacagatccattaagacacaggatcctctcctgaagactaaggaaataaacaaatcaaaagtttcaggaagtccctgaaactgacaagatgtgttagtcccatcactccctaagtttgtatgaacattaagaactgttaagccatcaatgatggcattaacctagatcattttaatgatgtagtgctgctcagatttctataatgtgcaattatccttctcctgatttataatttaatgtttggaatggaatcataattgtacccatgattaagcatggataattgttcttattgcatgaatttggagtatcttaaattgttcagcatggaagatcttgtgtatctgtttctgacttttctcttgtgctcttcattaatttcaaaaacatatgttgattattgtaacataagtcataaaattgatagtttgaattgtccaacttttttcttctatttccacattatctcagttattgtgattcttttatttttcctccttaacttcaaaaatcagtttattatttgaaatatattgatgtatttataaatataattttgactggtattcgattaaattaatgtattaaattaaaagaattaatcatttattgatctgtttgtttatttacttgtttatttatttttgtggtgctatgaatcaaagtgcagtcatcatggttgctactaattaaatgttctactactcccacaggcctgcctgatgttcaggcaggcaaaagacacccaaggagacagccagggtcctcaaggtctggcaatcctgaagcatccacaggcctacccagtgccttgtgaacttgggcagatgtgtgccattatgatgagcacatacatggtggagaaataggaaagacagagatggaacagtttgtatgctgtggtaagagattgacatggagaagcaagaagaatgggctgatgttggcagtctgcttaccacttgagactaggctagcatccagcctgggatgtaccataagggcatgtctgagtccatgattctaccgcagccagggtctgggttgatgccttaggctcctgttgtcactgggggctgagtagatacccaagggccagacaaccacctgagaccatgttggtatctggaggctttgctgttgacaatgctatacagttcaaggtggcctggggctccactaagaccatggtgatgtccgggcatgttgtctgaaatgttgccaagggcatgtctaggtccatgctcctgctgcagttggggtctgtgacgatgtcgatggccctagtaaccacagggtataataggaaccatgtcgttgcccagtccctcaatgaacctgggatacctagccctcgcctttgctggacacagcagcaagagagctgatcttgctcctccgcccaatgggagagctaactcctgtactctggaaagatggccctacccctcaccacaggcatgggagagctgccccctcccccaggcattggcaaaggaaagctggcccctcccttcacctaaggaggccatctcagtgattgggacctacaagttcagctcccattcagacccaaatcttggaccttggttgacccacattaatctaacctatctatgacatgctggagaacatgaaaggactgctcctatggaaagataaccacaggatctctatattcaggacaacagaagagtatcagagaggagttttggtgagggtccagtgataatagtgtgccacaggccttgaaccagaccaatgactcattgtaatgaacattttgtgtggggggctgattggacaaaggggtgtactgcctgacacaatttagatcctgatgtcaccagggtgaatgaataggaaagatagaagagcaaagtgggctttttgtttgtttgttttgtttgtaattaatttgggggcatgctgcaagagtgaggggcagatattaactaggaggtgagcaagattggagtgcatgtgtgaaattcccagaggatcaaaaaattatgtgtaaaattcccaaataattaataaagaattatgcttaaaaaatctactgctatgaaatgtccagaccttggctttacaaggcagtaaactctgtagttcatactagtctcagacttttgatcctccagttttatttaccaactgcctaggaatagacctctttgaaacattgagtgttaatggatgtgtaatgtactatggctccatgtgtttagatttcagattcataaatcagtaattgacaacattatgaacacagattctacatgtgtttttgagttttatacgtaatttctttagaagcaatcatctcctgtaaatttagcttataaagatatattaaaaggaggtctctgggatttttatttatgttgagcctctatcagaaatatttatctttatattttcaatacagtaatgcaaacattcaagttcagtgttatggtcttcaagatagaatgtagcagtgagtatatctcactaaagttctagaaacattaaaataggagtgaaggaactggaaaacctggcgagagtgcaaagaatatacccttgttttggttcagccactcaaagcctcacttgacctagttacttcttagttcaccctgggaatcatataagctgtgataaagaattttgaaaacttaaccctccataatcaatacattcaaccgtgaagctacaaatacttttagtgtctgttgctcttgcttcttatgagaataaattgatggagcactaagtgctctgtatgaaactcaagaccacgccctgtctacctccttctgctatatatgactgccaaaattatctccttaatttttatcagacataataatgtgcttgaatccagactaaaaatatgcatttataagctgttagtgtgaggaacagctggtgtgcccttaaaatagtatattatatgcattgctcctcataaatattttaaaactcccattaaaggggaaaaaagaaaactttagccaacaaatctattttaaagtcacagcatttttgtagcagcatatttcatggatattgaaatttgagagaacaaatagagagttacaaatgagatctaaagggaagcatcactattaatggaagtccatttttcacttcgatgctgtaaagatcagcaatgatctacacagaatattatcccaaacttgaataaatcctctgccctcaaaagcacctaagatagacttggggccattgtggaaaaacttatcttttaccttgcctttataacatctcggttatatatctgtttgcctataatatgcctaatgtacatctctgtgcatggctgaaagtagaatctattgccacagggtttggaaatttaataacaatttttctccatactccagaagaattgaaatggccagaggaatcgtcaaatgcaaacataatattagtgacagctgatagcttctcacctcttaccacagaggagatggtctacagaatctgcagcttttgaagtgtgtcctaatgtttaccttgatttatttggcttcaagtcaactctcagcccccattctcaattggcaggcattcatcttcagcagggaaacttccaaaagaacttcaaatcagtcattcacttttcatcagaccggtaaaattttatctcaggcaattgacattataaacgttaagaagctttacaaataagtaaactgaactcaacaggataatctctcattaataaaggaaatgcaagagattgagattggtacacagaaagtaattaagtgggactgaaaatgttaactcctggaaatgttctggtggattctacattcatagatttataatctatcattaaagttgagaatattaggtaggccacttaccataaggagctactcagttcatgtgtgatagcaattttgggtccctccacatataattaattctggcaatacaaaatggctgtggtgaaaaatagtaaattgggaaatttagatgcattaagaacacattcttagatctttgcaacttttctcttattgtgtttaatattggcattagtagaccccactgaatgggcatttcctacattcactgtgccaattaatctcttaactccaatttactcattgctaatgctgatataattaaggtatgggaagtcttcattttatggctgataacacttatcaaaagaggttagaacacttgggaaacatcttacttcatatatatttggggttcaggacagagatcaagcttgaaaagactcagccatgtttttaaagaataactgagattagttgtagggcaggagagatgtcttcatgcactgctcacccagatgacctgagttcagttcctagaaactgtattgggtgacacacggctgcctgtaactccacatatggagaatttgacagcctgttctagattctgtggaaacctccatacatgtggcatgtatacacataaagacacatgatcatatacagcagggaaaatgaaaacagatgttaagggtctagagagatggctcaatggctaaaagcacaccataaggcccacttttttatttaaacaaaaatttatccttctacttgatgttactgtgaatataattccagttgcctgggatctgacatccttaagaggaacttcatattatgcatctatgatacatagatataattagaaaaacacccatacatataagataatattttttatttaaatcttaaaattcccttgtttatcagacttatgcttggcactgcaatgggtgagaaagttgaattcatcaagtttgcacatttatttacttagagagtctaaaacacaaaaagaaaacttggaggtagtataaatttactgaaataaattatgaatgattatgagatttagagctactgtatatgtaaaatactgtacccaggggtgatattacagcatacactataagggactctaaaattgtaggtagaaaaagatctcatatgacgtcccaggaatcctaagtataatgaacagacacagtgatatgaaaagcaaagacatcaatatgaaagtaaggctatggagtttgtagcaattggcagagatttatacactggttgcaaccaaagagtatggaaatcagaatgtgttgaggaaggtaagcaggcactctattgaattagaaatcagttttcaaaataatgtcgcttgagggaaagaacatttgagaacattctgctatttcattttaggaagaaagctctttggttggattaggctgaagacttgtgagttttttgactttaaatgtttcagcaaacaactcaaactcactcagtcattgtagaaatcaaagccatccttatgtcttgctaattgtcaaaagccttcacctgaatacccccatatacaggcccaccctatccagaacaccctcagtgtcttcagtgtcttggttatgaagtgtctttaggatacccggttgcagctttactcactgatccattgagtaaaagcatgtacagctacagcatgtaagactctagttgtcagcagaccctgggcagttccttatcaccatatcctaggagtgctaaactttgtgctcctttgggtaaagcaaaaaccaaacaacaacaacaacaacaacaacaaaaaacaaaaaagaagaagaaaatacagatcaaatatcttactgtattcataacagcagaagttcacaagcagaagtagcagccatgggaacttgtgcatgtgtatttccctttgccttaatgcgctctaatttgacttctaggggttatttattcatatagatctttattattcctgtggcattacctttctagttgatactattttaaatataatatggcagagtttactgatcaatattctttcaaatcaagtcatcacaggcatagttatgcaaaagtctgcaattcactagtatgtttcatggtaaatttgtctaaatagacaacaaattcattgctttcttcgtctctaattttttttcaaacttaaaataacatcacatatatgtggaacatagacacttttagccatactgtaagtcttgccatgcttttttagtgacattgttttgctgctataaatctatcaacatataggtaattgccaaattttcatcttgtcttcctgggaagaaatacattatctgggagaaataagaatcagtttcattaaaatctttggaccccagtggtccagttgtgctgttgattctcacagcagtcctatgcatctctccctgggtacctgggatgttgaagtcaattacagggaaatacatgataaagagaatgtacttgaatataagatgctgaagaagggaagggcaaattttttagtgatctaagggatactggaactatagtactcctacttattaagtgttgtcagcaagcaaaatgtaagatatggataaatccctctacaacaggtttgacagtttagagaagttggaaaacatttcatcacgggaaacaatgagtatttggggcttagtagggcagagtccattgcaattgcttgtctctgtttctatagtttgaaagaatccaaaagtactatttgtgaggctgaatctataatcaatcaaggcataaagcaggtacatctgtgaggaattttcttggtcatgttacttgaaaaggaaagaacctccctaaatgggttggtagctcattttaaaggaggtctgggggaacagcttgatttttgcctgttagtcatggtgtctctctggtaagtttgactatcctatattccagttcatctacagtcaccgctatggttactgccacttctgctacagtcctccactcatacaaagctcttcaggactccaacacagattgacatctgtaaggagagacctctattcacctgtggcactgaccattatagaagaatacaaggtctagtcagtgatagtttaataattggtagtttattaatggaaaatactcacccaagagagccagtgagcaggtctgcacttgagcaggatagacctagaaatgcttcccagtcagctcagcctagcaagagagcctcgggctaacctcccagcatcttaaacctgttacatagctgtgaccatgcccaagcaggcatggtcagtggtacctgtaatcaaggtcacttcctgtaggccatgcccatttgggcatggccacaggtgcataaggggtgtgtgggataaagatcagaggagagaggcactttgctctctctcagggttccattcaggtctcagagagatgctgacactggattctcagaatgccagtctgggttatccgtttctcatgtaagaaataaataataaataaataaataaataaataaataaataaataaataaataaccaacaatatccatgtcccacgtacagtgaatttcctcaacatatatgtgtatatatagttatattgctgtaatcttggtccttgcttaattatttaggaagcttaagcctttgtacaacgggttcctgagaattataggcattttcacctacatttttatacctattagtcagacaaagattttgatcttcaaacacttcatagacctgcagaatatggcatttaaatgttttaatattagtactctgttgacatgaggcacaattgctcttcacagcacccagctattgcaaaaaaaaaaaattgttgggcaaacatgtcactccttctggagtggattgtctcctcagctaatggcctgttaggcaaagaacgcccccacttcaaccactgactttggacatgctgtcctactgtgcttgcaggaaataatttagaagactgctgcccccattcttcttggtgctggaaaggatgaaccttgccaagtcaggttgagacagcctttctacctccctatttatgttttggtcagtctgatattctaggccttagccaaagctggttgtccctatgcttctgtgagactttgggtaactgtgaagcctgatgtttctgtcttcgctgctgcacctttggaagtttctcacctgagcttcctgcctatcctagtattgttatcttccatctcaggtatttgatgaggttgaagatttggctatcacaattactgttctctttccttagaaatattagataggagacttaaactttccagcttagtacagctctatagcaatctctgttatgcctttaccctaggattggatatgtagttcttgtcatttgctcttgttgttttactggctttagatcttgagggtgtatgttcatactctaccttctcctggtgcatacttgaattttgccctctttgtatatagttttgtataaagtgaatcctttagactaaaaggggaattgtagcgacagacctctacacaggtgtggcactgatcatactcgtttgggtgtggtcacaggttcataagggacatgtgagataaagatcagaggagaggggtacttggttctctctcggcgttctctgaaactggattctcagagcaccaatctgggttatcggttcctcatgtaaatgatcttccctgaataaataaccaataatatccatatcccatgtacagtgaattttctctacagacatccatggctctacagtaatcctcctgaccatcaacactattctgtgactgtagccttatggactaacacttactgggtgtctctcacttgtgaaagcaaccatgtttggattgtccagactactaagtattaaccagtgcaatgcatccccttttgatctacgtgagaactccaactaacataagtcagtggatgcggctgtattctagtgatactggctttggtccagccagtttctccactgttgctttcccacatcattaaacacttttttttgaatagttgttttcatacaatacattctgattatagtttctccttccccagttcctcccagatcctcggcacttctctagtcaaccaaatccatgctcttttatctcacagcataatacaaacaagcacctaaagttagtaattgtgatcatcaccatcatactaatgataatcaagctagaataagacaaaacaaacagaaaaaaaaaagatccaaaggaaaagcacaagaaacacatgtacaagccgaaacacacacattcagttgcacacacagaaaaccaataaaaataggaaaccataatatttatcaaacagggtctaatctatatttttatgaataaagttgtgttacaacacaccaaaattcatttgcttgcaaatcattcattgttgttttcacataataagagaacaaatgaatagattgcaatagaaatgatgtggtatttatcactaaatactaaagtatttactaatgagctgtttctagaaattttatgtgagttctgaggtcagcccagttctactattcactctcatcaagttacgatcaagttaatttgcctttctatgtcccagtttgtttagccttgaaaagtgatgtgcacacaacattctgagctgagcttagcaggtaggcactctaatcttaactgctgcaataacttcttcttagggagtaccctgtcatcaaggaaaactttatatgttctggcattaatagaaatgtgaatacattacccagcagttgttcacttagtctatgtcacagagtttacgaaatgccttacaggcatcttttttaattcttatgatagtcttatgaaatattagttgatacaatagaacaacagcaccataaacattcataattacatgcaaacatctcaaacaatagcaatgtgctcagaagttagctatcttcacactgtgttttccttgggatattggagaaggaacaaggctctgtctgtcactgtgttgagaggaatctgaggctcatcctttccctgtaagggggaattgaacttacatttatgtaaccattactttcaaaagttttgtgaaatattcatcatctgtaatgtttatttaaacttgaactaatgtttataacccacattagatatttgtgagcaatatcaagtgaccttgcacttctcctcagaagactgtatgtggtgtgtggactttgagaatggtaagtaatctactgaaatagtagggaactcagaggcagcaaggaaaaaagaagcttatgatggacacccatttaaaaaaaaagtcaacatttccaaaatattgaaatattgccaatttactgatttctcgaattccatacaagattgtcagtactagtattttaagatatgctttctgtttgaaaattatttctttatattttcttccaataagcacacaactgtggaaatccaggcagtctttaagctgtaagctgcccccattcttcttggtgctggaaaggatacggtgatgatggtgtagaaaggcagcaacttttgactccattaaacacacatataaagagctctaattgtaattaatgggctggaaatatggaaaaatgaaaaaaagatataaatgagggagggaactatgttggaaagtccatgaaaattgaagggaggtaggggagtgaattagattgggatgcattgtagacatgtctgaaattatcaaagaagaaacaagaagtaacttaagaagagaaagaacagcaactagggatatagctcaatagtagtgttttcctgtcatgggcaaggttctatgttccaacactggcaccacaaaattaatacaaataaacaagactaaaaatagaaactaacatagcaaatcgatggtagtattttatgtgtctctctgagttcaaaaactatgaagaggtagagaaaacatgggtacagatagaatagaaattgattatttgagaaccaatgaactattctgatcacacattcatttcggttcaaagtcaaagatctttctccactgcttttccagagctgctgcttgcactggcaataaaatgatgtatcccttccagacattttgtttctctacccacctgaccatgataggtggaagtacactaaaatttctatagaaaaaaatactctgtccatattttctacaggaattacagttctaagtgacttaagtgggttgtaaaatagagtagtcaatttcaaatgtggtggaaaatgatcaagaattaatgaattatcagcacagcttacctcatcagatgtgtttcagacaaaactgcacaaacatggctattcaccacagcaacatctataatcagtaaaacgttttcaattgggttatagatgatggactttgtaattccttatatttttccttatttgatgtttaataaaaagaaatcaatcatgacatccccatttatggataaaacaaaatgtaatttagtatgaaatcatgagtctttgcagttagtgagaatgttgtaaatcgttcttagcatatcacagttcatttttatattatataagaaaaatcatctctgtagaaaaattgaattttaccatcaataacaacttacacaaatgaattagtgtactaagaaacaaggttatccttatattaaaaatggtaaattgacatgtaatggatacaatattcacctacattaataaactaaattatttataaatagactaaagcatttagggtttaatgaaaccagtcaaaaaatctggaagtaagatcagagttggaaaaattggagtaggatgacttcacaaaataaatataagtagatactttctaggctattggcttctaaattccactgtgggcacaaaggaggaacacatttattcatggaaaagccagaaaatcctcagcccccacttggcatttaaaaatgcacatacatgtcagttgacaagcaaaattgcttctacggagacagcattattttcatgaatcaatacaaacataactgaatgggtgtcattgtaagtctccaaccaggatatttttcagcctgctttgctttgtattattatatgaggccaggatctctggagaaaaaaaaaaaaagaaaaacttttaaaaaaataacaggacaacattattaaaattttttgacttcttttatttgaattacaaacaagattgaattacatgacaatcccagttacctctccctcccttcctcccctactgtgccccccaactaaaacccaacctttcttctaatctacacctgactcaaactttctgcttcctcatgatctttgcattcttccttttcttcccttctcattcttgtagctccttccccccacttcccaagttctcaatttgctcaggggatggtgaccctttcctcttctccaggggacaaagtttgtctcttttaggctcctccttgtttactagtttctctggcagtgtggattgtaggctagttgtccttgagtgagtacatatgtttgtcttgctcagaatggtttcttccagttccatccattgtcttgtaaatttcaagattccttttttttttctcctgactactactccattgtgtaaatgtaccacaatttctctatcaatttttcaggtgaggggtatctaggctgcttacagtttctggctattacaaatagtgctgctaagaacatcattgaatagatgtctttgttgtatgaatgtgcttcttttgggtatatgcctaggagtggaattgctggatcttgtgttagaatcattcccattttcttgaggagatgccatactgatttccaaagtggttgtgcaagttggcacacccaccagcagtggaggagtgttcccatttctccacatcctctccaccataaactgtcattggtgtttttgattgtaggcattctgacaggagtaagatggtatctcagagttgttttgatttgcatttccttgaaggctaaggatgttgaacactttcttatgtgtctttcagccattttagattcctttattgagaattgtctatttagttctgtaccccacagtttaattggattatttggtgttttggagactagcttcttgagttctttgtatattttggagatcagccatctgttaaatgtggagttggtaaatacatttttctagtctgtgggctgccgttttgtcttgctgattgtgtcctttgccttacagaagcttctcagtttcaggaagtcacatttattaattgttgatctcagcgtctgtgctactggtgttatgttcaggaataggtcttcagtaccaattaattcaagggtatttcccactttatcttcaggtaggttcagtgtggctaggttcatgttgaggtctttgatccattttgacttatgttttgtgcagggcaaaaggcttgggtctatctgtagtcttctacctgtttgcatcaagttatgccactaccatttgttgaagatgttctctttgttccagcatatatattttgattgtttgtcaaaaatcaggtgttcgtaggtgtgtgggttaatatcagggttttcaactctattccattggtctacctgtctatttttgtgccaataccaagctgttttcaggactatagctctgtaatagaacttgaagtcagtaatagagcttgaagtcagggatggtgatgcctccagaatttcctttattatccagggttgttttggctatcctgggtcttttgtttctccatataatgttgagaattgttctttaaaggtcagtgaagaattgtattgggattttgatggggattgcattatctgtatatggcttttggcaaaattgccatttttactctgttgatcctgcctatgcaagagcatgagagatcttcccattttctggtatcttctttaatttctttctttagagactcaaaattcttatggtacaggtctttcacttttttggttagtgttaccccaagatattttatgttgtttgtggcaattgtaaagggtgatgtttctctgatttcttcctccaccaatgtgtcattggtatatagtagaacaactgatttttttttgagttaatcttgtatcctgccactttgctgaaggtctttatcacctgtaagagttttttagggtcatttctgtagactctcatatcatctgcaaatagtgagagtttgacttcttcctttctaatttgtattcccttgatctccttttgttgtcttattgctctagctaggtattcaagcacaatattgaagaggtgttgacagagtggacagctatgtcttgtccctgattttagaggcattgcattgagtttctctccatttaatttgatgttggccgtcggcttgctgtgtactgcttttattatgttgaggtatgttcctgttatcccagatttctccaagacctttatcatgaaggggtgttggattttttcaaatgctttttcagcatctagtgagatgatcatgtgttttttttttttccctcagtctgtttatatggtggattacattgatgtattttagtatgttgaaccatttttgcatccctgggatgaagcctacttgttcatgatggatgatttctctgatgtgttcttggattcgatttgccaatatattattgagaatttttgcatcgatgttcatgaaggatattggtctgtatttctatatcttagttgtgtccttgtgtggcttggctatcaaggttattgaagcctcataaaaagagtttggtaatgacccttctgcttctattgtgtggaatactttgaggagaattggtattagctgtactttgaatttctgatacaattctgcagtgaatgcatctggccccagcctttttttggttgggagacttctgatgactgcttctatttcattagggtttataggtttatttaatttgcttatctgttcttgatttaattttggtaagtgaaatctgtccagaaaattgtccatttcctttagatttttgaattttgaggaataaaagttttcgaagtatgacctgatgattctatggattttcactgtctattgttatatccccattttcattcctgattttattaatttgcatattcactctttgttgtttggtaagtttggataaatgtttatctatcttgtttattttctagaagaaaaactcattgttatattgattctttgtattgttctcctagtttccattttattgattgcagccctcaatttgattatttcctggcatatatacctctggggtatattggcttctttgttttctttcttttttcttttcttttttttttcagacagggtttccctgtggctttggagactgtcctgtaactagctcctgtagatcaggctggtcttgaactcacacctgcctctgcctcccaagtgcttggtttaaaggcatgcgccaacaatgcctggccgagcttctgtgttttctaaagctttcagttgtgctgttaattctccagtgtgattattctcctgtttcttcatgtgggcatttagcgctatgaactttcctcttagcactgctttcaaagtatcccataggtttgcctatgttgtgtctgcattttcattgaattctaggaaatctttaatttctttttttatttattcctggacccatgaattgtgcaattgggtgttacttaatttccatgattttgtaggttttctgtagtttgttttgtggttgaatgctaattttaaagcgtggtggtctgataagacacagggggttatttcaattgtttgtacctgttgagatttgctatgttgccaagtatgtggttgattttagagaaggtccatgtggcgctgagaaggaggtaaattgttttgtatttggatggaatgttctatagatatctgttaagttcaattgcgccataacttctattagttcttctgtttcttttttaaatttctgtctggtgttcctgtccagtggtgagagtggggtgttgaagtcttctcctataagtgtgggtgttttaatgtgtgaattgagttttagtaatgtttctttcacaaaagtggatgcctttgtatttggggcataaatattcagaattgagacttcatcctgatggatttctgctgtgatgagtaggaaatgaccttcttcatctcttttgattaattttagtttaaagtccatttttttggatattaggattgctacccctgcttgtttcttgggtccatttgattggaaaacctttccccaatctttattcttaggtaccatctgcctttgaatttgaggtgtgtttcttgtatacagcataaggattctgccttcttatccattctgctaatctgtgtctttttataggggagttaagaccattaatgtcaatggatattaatgaccattaattgttcattcttgtttttttatgatttggtgatggtagcgaaattatgtgtcggattctatcccttttaccttttggctgttagtaaagtggggttctccattgcctatatttttctggtcgtaattaacttccttggcttgcagttttccttccagaactttctgtagggctggatgggtggatatgtattgtttgaatcttgttttgtcatggaatatcttgttttctccatctataataattgaaagctttgctgggtatagtagtctgggttggcatccattgtctcttagtgaaggtagaatatctatccaggaccttctggctttcagagtttccatggaaattcaggtatgattctaataggtttgcctttataggttacttgacctttttcctttgctgctgttaatattttctctttgttctgatgtttgtgttttgattattatgtggcaaggagaccttttttggttcagtctatttggtgttgtgtaggctacttgtattttcattggcatgtctttctttagggtgggaaagtttcttctatgattttgttgaatatgttttctgcacctttgagttggatttcttcaccttcctctatatctattattctttggtttggtcttttcatggtgtcccatatttcctggatatttggtgttagggatttgtttatttaagattttcttcagttggaatctatttccgctagtgtgccttcaactcctgagattctctcttccatctcttgtattctattggttatgcttacatttgtagttcctgatcatttacccagcttttctatttccagaattccctcagtttgtgctttctttgttgtctctatttcagtttttaggtcttgaactgtttccttgagatttttgttgatatcttgtatgttttggtttgtttttttcttccatttctttaaaggattttctcatgtcctctgtgaggtcttgtatcattttctgaaggtgtttttaaggtcattctcttctggttcatctgcattatgatgttcaggtcttgctagtatatggatcctaatctccagaggtgtcacattgagttttctgttgttgaatgtgcttttactttgtcctcttctcatcctttcttcttttgactgtagcaggagttttttgctctcctggtgggtatgtgaccaaggttttcttctggtagatgcaaacagatccattactctgatgtctgtcttcttcttgtggatggagttgtcactattacgggggcattgacagtgttcgggtgtgttgggaccctctgggctggcagatggagatagaactgccaaagggtgatcagtgtgtcagatccggcctcggaattaggtccagagtgcagattgctggtgtcagatgactctgagcagtgacaaatgggatctggaaactggaaacaccccctggcctacctgggccagctgatggctgcattgctgccaccgggcctacgtgtgtcggattccgctgccgaattgggtccagcgcagatccctggtgtcagatgactctgagcagtgacaaggaatgggaactggaaaatttttacaatgcaaaattattcagaattggaatgttctagactgtagaacaacacacaagccatttacattttaataaaacctttaaaacttactagtggttgtgagcatgtatatggtgtatgaacatggtatatgcacacatttgagtttgggtgtgcacagctacaaatggatatggaggtcagaaagttcagaatattgagtgttctgatctgtcactttttgccttgttcccctgagacagggtctttctgtaaacctggagtacttgacatgtaggctatcctggaagtcagcaaacctttggggtacttttatctctgcccccaacagcactggagttctggatttgtgaaacctcacctaacattttacataggttttgatgactgaaggcaggacctcatgcttgcagtgtagcctctgagccattttcctataggggaagctgtagccacgcctacttaggggctggctacaggtgtacctaaccacgctttcgagaccgtggtcagggtgacatagagcaatactgcattttctctttcggtttcactttggttcttgctggacagactgctgccacaccggctggctaggtcgctctgtaagtaaggcttttctttattaaatacccttatatttctaccagactccatattggtaatttcccactattttttcccaatatttttccattaaaataccaaaaatcaatttaattgaagtgtcacctctctcaatgaaacgtctaaaactaagttgttttcatatttttatttgtttgtttccctaaaagagctgtgtatctctaatgaatttttaacacattttaaaactgaactccagtattcttttaaaagatatgagggatatttttctattgctacttttttctttacaattttttcaatgtacagacaacatacaaaactttgctgtaattttatagtttaatagtacctctctaacttgaagagaattgttggttggagatgtaatttgtgtaatatgtaataaatataatgcctatatattataatatgtaactttaaatcaatgtttaatatacatgatatactttgaaaatacgtaaccaataattataagcaccatacagtcaaccacactatttcttctaaataattatacataagttcattcatatacatggtttatatagcaatacacatattgaacataattgtttatagaataaaagatgactaattctacttactgaattctccttgtaaaaagatagctagggtgaaatgtgagcatattcctttattctgtcataagaatgatgctagaaaagttcagttatttctattgagacttgtaccacagtgataggattttcatcccaaaagtgatacctgaaatagatgaagaacagaatgccgggcaaatggataagctaatgagaagttccagcaccatgctacaactttcagagactgtgattcttctaccaaccacacacacagtacatttaatttatgccccaaatgataaagagcttgaatgttaagaaataactatctttcaactagtgttctacttgaggggaatggaatcaatcttatcctggaaacaatcaggagctgggtgtattagttacttttctgttgctgtgataaattgtcctcaccaaaaacatcttgtaatggaagaacttgtttcccttatggtttcaaaagaagagttcataatggcagaagaggaattgtgtcaggggcctggagtaggatgctgagagatcacatcttcaacaagcaccaagcagagaatgaactggaagtgaggtggggctatgaactctcaaacacactccagtgatgcactttctccagaaaaggtcttacagctacccaaacaacaccatcaactgggaccatatattcaaactggtgagcctaagaggaacatctcttgtccaagccacctacacaatcaaggtgtcttttcctgatactgtgatacaatgtcatgaaaaaaaaaatacttcaatggtgatggtgcttcttttggctcacatttcaagggtacactccattatcatgaggaagtcaaagtggcaggagcattacattgtgttcacagtcaagaatgataggccagtgcatgctgatgttcactctgacttctgcattttaagcagtgcaatatcctggctcagagagtgttatgcacatggttcaaacaggccttctcaactaattaaaccataaagatagtccctcacaggatgctttgtggctacataacccctaaaggtaggtatgtagcttgtcttctcatcaattctagatctgacattgaccatcaacactaagaacaagagaggaacgattacatgacaaatgttttggtgagatgggactcattcatgctcataggtgtgactaatagtcataatgtaaaaaaatattttatacaaatcttctattacatctggatatagttcacatttttcaatcgccccaatttatttgttttttaatggaaaacatgttttttcatatagtacacttagcatatgttatctcctccctgaaataccccctgtattatccccaccaaaatctacaccctattttgagatgtattttcttttttttaagtcattttttaaaatttaaattagaaacaagcttgttatacatgtcaatgccagttctatctccctcctctccatccctgcccccactgacgccttatcccatcccctttctcctccccataatgatgaagccttccctgggagatattcaccaaatctacaccctttctttctctctttcactaggataccaacagatttctaaaacaatcataataataataataaaataagataaaataaaaataaacaaaccagaattagggcagcacaaacaaaagaaaaatgttcaaaaaagtaaaagaaatgcatactgatccagacacacaaattcacatatacaaaaatcctataaaagtaaaaagtaggaaatgatgatatatatgaaaaggaaagtaagggggaaattctgacaaagcattatgacacaaggaaactccaaaatatatcattgaccttattttgtgatggacatctactcctggacatagggctgtccctaagagtggtttttgatcccagtaatttacatgttttaatatatggcacactctatattttactgtatctaaatgaaaacccttttcatggccaatgtcaaatgaaagatacagacactaaatgattaatgcaatgtgaataattaaaagtagcatttatctgacaaggaataagactaagaaattcacattacttatatagaaaacacatctccctctacaggaaatagtcaaagtccaatatcacctcattgttgctacatagtcaatacattgtagctcctaatctgatacttttttgtataagatggcaaacaacatgagctttgaagtccctaaaaaatcataacatcttctatactcttaccccccattagattgagaaatttagcaaatatttatgtttgtatttgagtatcaattaaatcagcttccattattccttagcaaagtgggatgtttgttgtctatttcatgaattactacatactctctcctacagggcccatttgcctcatttctataagattaaacactatgtctcatagaatcatgtctcagaatttattcaaaatcatttaggctgatttctctttaaacctataatgtctccctgtattatattatctcttatcttgctctcttcaattttatgtaattgatttcttctgcaagcacttctgtgaaaatcatgtcttcctcacccttcttctccacttctcattctcctagttccctctcctctctccccatgctcccaatttactcagcagatcttgcccctttccccttctccaggggaccatgtatgtctctcttaaggtgctccttctttaccagcctccctggcagcatggtctgcaggctggcaaccctttactctatatctaaaatccacatatgagtgagtacatactatgcatgtctttttgtgactgggttacctcgctcagaatggtttcttctagttccacccatttgcctgagaatttcaagattcccttgcttccccccccccccccccccactgagtagtactcccataaatgtaccacattttctctatgcattcttcagttgaggggcatctaggttgtttccaggttctggctattacaaataatgctttgatgatgatcgctgaacagatgtccttgttgtatgaatgtgcttcttttgggtatatgcctaagagtggaactgctggaaattgtggtagcctgattcccattctactgaggaatcgccatactgatttccaacgtggctgcatgagttggcactcccaccagcagtggaggagcgttcccctttctccacatcctctccagcatgaactgtcattggtgtttttcattttagccattctgacaagagtaagatggcatctcagagttgttttgatttgcatttccctgatggctaagaatgttgaacacttcttatgtgtctttcagccatttagattcctctattaagaattgtctatttagttctgtaccccactttttaattggattatttggtgttttggagtctagctttttgagctcttcttaaattttggagatcagacctctgtgagacatcggttgtcattttgtcttgttgactgtgccatttgccttacagaagcttctcagtttcaggtggtcccatttattaattgttgatctcagtgtctgtgctactggtgttatgttcaagaagtggtctcctttcctaattcgttcaagggtatttcctaatttctcttctaataagtttcagtgtggatgggtttatgttgaagtctttgatccactgggacttaagttttgtgtatggctatagacatggatctatctgcagtcttgtacatcctagcatccagttatgtcagcaccatttggtgaagatgctttctttattccattgtatagctttagcttccttgtcaaaaatcaggtgttcataggtgtgtgggttaatatcagggttttcaacttgattccattggtatacctgtctatttttgtgccaataccaagctgttttcaggagtacagctctatatttcaagtagagcttgaaatcagggatggtgatgcctctggaagttcttatatggtacagggttgtttgtctattctggatcttttgtttttccatataaattgagaattgttttttcaaggtctgtgaagaaatatctagagagctacaaagaagataccaagtaacaatctaagcaacagaggggaggctgccttaaatgccctcttctgataaagagatttatggctaattaatatgccatagtacagccttcatccagaagctgttggaagtagaagcagaaacccacagctaaaccttgaactaaactgaaatccagttgaagagaaggaggattgatgagcaaagtggtccataccaggctggtaaaaaccacagaaacagatgacctgaacaagggagagctcttggccccagactgatagctgggaagccagcatgggactgatccagatgctctgaatgtgggtgtcagtgaggagaccttggaaatctatggggcctcttgtagtggatcagtacttatccctagcataggaattgactttgagagtccatcccacattgggggatactccctgagcctgggacacaagggtttggcctaagccctatcccaaagaatatgatagattttgaagaccacctatggaaggcctcacaccctctagggagcataaagggtatggaatatttagggtattagttcagggggcaggagaggaggggaggtacagggacctgggattgacatgtaaaataattttctttctaacaacaacaaaacatttaggatcctggacagatgatttggtgattaagagttgttgctgcatttccagagtattggggttcagttttcagcacccaaactgggtgattgaagccacagaagatctggctccatctttgggcctccatgggcacctgcacccaggtacacatatcctctatacaattatatgcaagtaaaataaaacaaatcttaaagctcaatttacctaaagtagtccccttctcataaaaattctgatccattttatgctgattttcctatgattatttttacctcaagccttctgccttcttagataaccgtgcatgctctatgatgttgctaaataaaggactctatggcatcaataaccatgatttctttatgttctttttcctttttcttgttgttgtttgcttcttttatgtttttcctttgttgtttgtttgatgttcattttggtcatcatctcttactactatttgagaagatgaatggatgaaatttgatctgatcttctccaagaaggttgcgtcactgaaagaagatgaccttaaggaaactttaccatggcctctgacattctttcctgttttatgattacatatagagaatgatgatgaagtatattcattaaattttaagtgcaaaagggccatgcacaaaaacaatcagaattcacagtggccttttaattttatgcaacatatgttttacaaagagctgttcacagaaaatgttcttgtgctataaaataaacaaaaaggatcccaaggaccaaagcagtagttattaaacatttttaatgaggtggaactccagacatcagtaacttctaagatctaccctcaatgattttatgcagtgatatgtccatatttcatgaccactgatttggtgatctggactaaagaaaaataacaacagtatatgttatgtccaagaaatcatttcctctcttaatttaagtgtttctatacattcctagttagaaaatcaggaaacagaattttcatttcaggattaataaattcttgtaatgattgtgacagcaagcattcattcaaggtagtaagtagattatagctaagataagatcttacttagtcttcagaataataatctatatttaatctttttagagatgataaattattctccataaaattaaggcactggcctgggctttggtggtgcacgcctttaatcccagcacttgggaggcagaggcaggcagatctctgtgattccgaggccagcctggtctccagagaaagtgccaggataggctccaaagctacacagagaaaccctgtctcgaaaaaattaaggcacttttccaaacaatgagtatgaagaccaggagcacaactgaatcccctcactatctcatatctcttctgtctctgtctgtctctctgattttctctgtctctttgtttgctctgtctttgtctgtttctctgtgtctctgtttctgtctgtcagtctctgtctctctttttctctctttccaccttattccattttgcaaactgaagaaggcagggcatgctttattttctcaaaggactgaatgtgcttactgaagaatacaagctttcttcataaaacccaataatatgcagacagtaagtgttagataaagtgtggccacttgccctgtcaggttctacattaacacatataaaggtaagtctcatggacctctcactcccttcccagtctaccacctcttacagcactgacaccatgacaacttcaaagattaataacctctcatctttttttcagttctttccttctgattttggaatagaagttaattttcaagactccctttgacatcttgatgcttatgcagttttgtgactgtcctctgatttgaaatgaaactgctggggaaggggtaggaatagagacttcaactggaaagtgtttcactctgtctaatttctctctttgaatataatcatgtacttggcatcacatacaatagcacaatgtttatattgaaaatcattggcttcgaaccactgttcatatctacactaaaaggaaaattctatctgtgcttgttcattcaacatgttcaatcaattaaaatggtaatctaatttttatacaacctttgaaagtttgggaagagctggctctctgaaggccacagtgtcatcaaaaacatggaaagcctaagtctggatattcaatagcaagaccttcatgtagaaaggaaccccatccatcagtatggaataaatgataccatttcatttcccatccacacaagttgaatctcttacagtttcctgacatgaggtaatatttttactgaaatacacaattattttcatctaaatccgatgggaatgttaaaacactggaaaaaaaaggaaagcaaactgaatggctaccaaacagatctaaccacaatttctataaattaccttctgtggttgtttttcttctcttctacatggttgcccctcatgtgctgggatcaaggtggtctctatctgaattatgacacttttcttggaaaagaaaaataataaccccatgtgtttgtaatccttgaatgccaagtgtttactttgaaatcatgagcactatttgctcttctacagtatgtcagtgagttttcaacttccaaattctcacaacttctgcagtgtgttcccaactccagtactcctcagcaataaacaagaatgtctagaaataccctcaggtgtgtttctagtgtgctttaagaatataagtagctctacaagaacagcaacaaaaaagaatcccccaacaactctgcctagaaacctaaccacagcaaacatgtactaagagaacatttgtttattctatctcagagagttaaactagcctgtggtctaaaagctgtcccattgcttgagagagacacacatattgaagacctttctccctggactttcgagccactgttctggattatttcatctgtagagatgaaggtggcatgattctggtaggaagtgaaatgcacagcctgacaatttccaagccaaggagcacatacaagctcttgtagaatgttgccatttgtgtggtctttcatctaatattgggtttatcagtcaacaagacacttagtatcaacctctagtaatgacggagcttcaaagaatcctgtgttacagttgtgtagttggcagggtcagcactctattcaaatgacttgtttttactcacatctggctaaaggtattaaatcatttccataatattacaactccttttcacatagaaaataagaaacctcaaattctgactcttccatttacagcttattagactcagggaagttatttatctgtattgattatttttctcaaatgtgacttaaaaatgaaataaatctcagacaagtattataaagaaacaatcatatgaacattgcaaatctcttggtccttgaataactaagataatttttaaatcttaattattaaatgcttactctaagtaagagatattacttagaaatttacatattaccacatatgtaatgtgcaagtgcattaaaaagacacaaaactgtacttttacatttgcacaaataccattaactacagagaagaagagcatcctggtcaaagttacatggatgagtatgtcatgttaaaactgccttctactgctacttgacatttcctttctaccctaaaagtttaggaaccaattctgtctttagagtaatgatgaaagagcttaataatatgtttttccagtattcattaagttgttccaatatgaaatttcatacaaagagtcttatttcctattttgcaatttaggtaactattaagttcagactgactgcccttaaatactcataggtaccaggaaaagtccatgagttaaaatcttcgtatactgaatctttatcaatgtagagtttatggattagtcagtagtgtggattgtctatttatacacaacaacacttaactgtcaaaagtcacatattcgacttttggtcacagcaatcttcccactaatgactaaagtcacagggtctacaggttgaaattgaaatcttacttttcctctttcctctttttagcacagagctgccatctgccagcgacagcagaacttacagcttcctaattcctaacaaagatacagcaggaaacacatggtttatgctgttttctcttgaacaatatttctaaaatttgttgagatgttgaaattttcaacacacatgcaaactataaagggatcagcctggaggacatttctccatagacaaggaaagaagacttgacaatgcaccatgtgcttacaactgccagggaggcttattcagcagatcatgtaggatgggaatataaaaaatagaagcaagtttctgagctaaccatacatgccagtgttgactgtgtcaggtgctagtcaaggtggactagatgcacatctgaaatactcttgaaaaatgctctgggatttacacagtagtacagagtaagtaacaaaactctgaaaaccaagatgtgaggccatgattctggcttcctgtgtcttcacctgaagttatctaaggaaacacagaggaaaagatccctaccgtctctcccttttcccagaaatatagcaggcctgttggatgcaggttccactttttgacctgattttacatgcactactttcttatgtccactgtcttacatagttatagtagagatcaaggcttaccctacacattaagtagaataatttacaattgactgtccacagcaacataaactgatgggcacatatttctacatgtctctagtgttcacagttaattaacttcatttcaaatgttttctgtgtgttggttatttaatcccaatgaaatttttatgaggtaggtaatattcacaccatgtctgttatagaaaaggaaaatgttatcaaagaaatattagtaatttcctcaaaagccaatattcaaactcaagaaatccgcatggagcccctgatattacatactgcccttctgtgctcagcattctagttacaaactaaagaaaattattaatgagatgacacccaggtcaaaaggataatgtctccaatatcacagtctggacaaaggaatctgttcgcttctctgagactaagtcagtcctgaaggaaatgggacagagtagtagatagtaattaataatcctcatgaggtattcatccaaagtactggtgaagggaaggtgctgtgtctcagatgacgagaacacagaactcgctccaacttcatgtgatggacaatcacatcagacaatcaggctgtaaatattctcttcacaggtttaaataaagtgccaatgaccactcaaactctaatttcagtttctttgtctataagagcaacagccatgctaaaagatgcattgaaatggtgccacacagtcttatcagtcttgtcattaatattttcgatatgaatgttattactttgcattaattttaataaatatatgtacatagaaacatgtccaaacataaagaccatacaactagataaatagaaatataattagtattctaatatctcctatatacacaacttattttctaccatcataggtaaacattatataatgttgccatatgattacatattccttctaaatacaaccaacagcaaaacttttacccctttaatatacaaataaaatatgttttataaacaaaatcaatcaaaatcagggccttgggtacaatgaagtaaattaccaatccttcttgtcatgtaggtaggcacagtgcctatcaactctttgatgaacattttgatgttaccatgtcagcatgttggtcattttagttgattttacagtgttgttcccaccagagggcccaagatgtaagaaatgagaagagagatttaaaaaacattcaaaaagacataatgatatatttataaatgacagaccacagggatatcaaaatatcaatgatgcaatattaaaatctgtgtggcatccatctgattttaaagaaacttctgaatcttaatttttttccccaccatgcctgaacgaatggaaacatatgacttgagagtcataatgaacatcacacaagtatcacgattaacttttccccatattaatgttattaatttgcatttactttataaacatatacaaatcagagcaaacagagtcaaaaagcaaaatcaacacaaataattaacagcagaaagcaaagcaaaagtgctagaaattctgaggtgtgagaaccatggacatgctattcaaaggtcacaaactctgctaaacgttgaataaatttgggtgattcaataaacagaatggggctcatagttaatagtgtattttatgcttgaaatgtgttaagcaagtgtatctcaagtgttctcatagacatcaaaggaaaaatcctttaattttgtgagctgatggctgcattctaaagcatggtgatgataatcatttcattaccacttcgtttgcccatccagaatgtattctgttcttttattggcatcttagtggatctggggcatgatgctaatgaaagcactattcccacttaaataggaagtaccatggctgtatagccaaatgctgaaacgaagatcagtctatattcatcttggtcgtagacaaagagacaattagacttttctttgtcattccaaaagtatagtttctaacctcattttgaaaaaaataatgattgtggaggtttgttgcatgttccctgacagacaaaagctatccaaggacaaagtcaaagctttatgacgtttcctaaggtgacaagggagctgttggtttcagtgcaggaaggggagacaaaaatgaaacaggaggtctggatgggcatttctgaccataaaatacgaacattatgtaagattatgaacacaacagagactggataggggccctcatcaatcaggattagacaagaatgataggtgaaggttctaggatgatgttaaattagaaacaaaagcaagtaaataaagtttgagtctcatgattctgaattcactacttttagcatcacttcaaaataattgttaatattttataacatatagttgaagaggcagctgaagatctagaccagctctggggagatttctagatgaggctgaggaacagactcttatccctaccacacatctccttcatctggagagagtgttgaaactgcagcctgctcagatgggcactgaattcagacaggtacagattgtgcaaaaacaggcaattttagaaacacaatcttaaagtttctcacctctctttaaaagacccccttactatgcaaattccactgcctcttggctcatattctctggagagtacctgctgtcctctgctccctctctgctgcctttctactcttgtctaagctatgctttcaagtgttttaattcattcagatattttctagggatgttgaagttcaattattacttgattttagcccctcaatatccctctttcttaggtactcaaagctatacatgaacacaagagtaaaattattcttgattttctgtcaaatgcttttatagtacttttattcttttacagaagaataaaacctgggagaaaaactaaattttcaaatgcaattctcagaaacaaaacaaacaaaaaacctgagtgcaaacctgataatgtcagcctactttcctaagatgcatgggtccaaaggagatgggaactccactgcagaatctatgaagaggaagagccagagttaagtctgtgtatatttgaaagccattcattagtggtccacatgtcagtctgtgattatcagtcacctgctaacctggcagagctgaattggcctacaatgtgaatacagacacagcaggaagaatttatcattttagagcatccagaagtttttcagctcacagggtgtcaaaataatctccccagaatgagtgggaatgcttctgctccaaggggtgtcacactggtagtaatgcaccttaattattgctaatgctagagagcaaataaaacatctatacaaaaccttaccttttcaacaacttcaagtttgtctttgatgtaattcaagaaaagttctttcaaatttacatgcttttaaaaatatgtaactagatacctgttgtcatcatgtatatatacatgagtagtcatgaatacatgaaatctataacatgttagcaagctttaaagaaaactatatatatatatattatgtatatatgtatgcaaatgtattaaaggaaaggcacatgacaatcaaggatgcttccgaacattaagtgctatgtttattcatctcaatacaatttcatctttctatgcatttaaaattttcatataagctaggaaagtaatacaaccaaaatgaaatagggagggaggaagaaacagaagaaaagagagaggcgggatttgggcagacagagagacagaccaacttatagacaatgtaccctacatgttcactattacaggctccaaagtctctttgtttaattgaacccctaccttgacaaacttcaagttgtagtttgttgcagcacatgatgtagaaaaagagctcttaaagtcaactttataactaagaaagacaaaatgttcaataacctggaagcaatggagaagctgacaaagcacaaatgtgtctgccactccaaaagagatagaaggaagtcatgacaatgtgcttgaagtttctaccataactagacttcacctctacccagaatgactacagagtcacatgcttggcacatgcttggcctgtgcaacaggaaacacatgggagttatgctacaacatttatggtagcttggattccatagccttggcaggccagtatatttcagacctatagggtgttttttgcactctttgggaacatttgctacaaattttataacctggagccaaaacatattaacctctgctcttggatttgttcccaaacctagaacccatgtttataatttcaaattttaaatctaaagtttatacctctggacttttaattttaaatctaaccagtgggtgtatctaggttcccatttcctctctgtttaaaatgtttgattatattttagaagaacaacaataattcatttagggaaataacttgaaatccatgcaaaaatgattcaatattgacttagatgagcttgagattcagaacacctatatttggttcttttattccattttcaatgaggttttcaataatttatatgcattaaattacttttaaatcctatttgtttatctctgattttatcaagagctgtagtgttgtgattattcctagagccttctgggttactctgtttcccaagagtttgtaaagtcaggtccttgtaaaatatctcacagcctgctgctgtttaaactgattttaatattactccaaattaaatccattacttctactctatcaattttccagcttgaatcagtaccctcaagattcccatctactgtctattatgaagccattggttaagtctgtctccttgttccatatcctgtcaccttacaggccttgaaaattctatcatagaatctccacatgctttactccttgccagagatgtctaattcttctgtgcatattacagtgtcaggcatgttctacacnnnnnnnnnnnnnnnnnnnnnnatggtctaatatcaagtgactttcattgtactagtacaagttcattcctctttgtcaaagtctgcatcttagttttctcctctcatctataagaaaaatgaaataaatacagttggactcagtataaagttattattacatgaatagaaacaatcttctagctcttaaacgtttagaaacttggtcaaagggaggcctaaactttaagcttggagaaatgtatgtggcaggcccaagcttcaggcttagagcagcatcagaaggaggcctccacctcagacccaagagcaaggagagactactgggggagatcacagtgacagttttcagcagcagttttcagaaactatcactagaagttcctctgggaaaaagcacctgtgtcccagccagaaccactgtcatttctctgttggagatacccagctgctacatctaccactggacgctcagcccaatctacacctccacggaggtgtgcccactggagctacagtcccacctgtacctcaaggagtgaccgcctgaactttgggcccatttccgccaggaggagcgttcactagaggctctactgtgcttgtgcctgaaggagtggtcaatggagccacagcccccaactataccaactggagaaagagatagccccatgaaccacaagctccacctataatgactagaggaagagatgtgtagacaacaagataagaatgcactcaataatataaagagcaatacagcaccagtagaaactagtggtgctacaatagcaagaactgaatatcctaacacagatgaagtagaagataacaacctaaaaaactttatgagaatgattgagtcccttaaagagcaaaaaaaaaattcctttaaagaaatggatgaaaagacaaaaatttagaaacattaaatcaacagaatagaaaacaaattttatttataagccatttagaattaagcactttaattaaacattttatgccaaattgctgacatacattctgcattttatgtgctgttagatacataagcatgcaaatataaaattagatttactaataatttatgtcctttagtacactaaatgctatattctactttatttttaaattttaataaagttaattttattacttctttgagaacttatggatccattcaaagcattttgattagattatattccttccaataacaccttacaagtccatccaatttctcccccttccccagcccatttatcttcatgtcctttgttttgttataacaatatggatttctatttgtgtagccaacacgcttaaaggtgtggggccatccagtggaacatgtcaaaccagtcacagagcacacccataaaagaaaatgaatctccttcaatcaaaagccataagccactccctcctatacctgtgctagaacattgcctggcttgatcctgtgctgatatattgcagagaactacatactgtaaattcctgagtataatgctcctgccacatcaaggaaactgtttaattctggtgtcctcacacctttggtttttactatcttctaccccttttccatgatgctccctgagccctggagggtggtgagataaagatgtgcagttgatgactgagccttggggagaggttgggacaaagatgccccatttgtgactgagcactccttattgattttctggttttaattttctatactttgtgaatttctgggttaactgtcatgcaccacacgtggaaaattctctgatgacatctgagatttgcactaatctgtaagtataaaaaactgaatttagatggcagtttgatgctgtatttatttagcaaaatcaaaagtactctcattcccagggcctatgagcttcccagtcatgggttcctggtcagatctacagtaccaaccatgtatttcctactgtgcagtgaaccttaagtcttatcagagagcaaatgattacacacataacattcatggcactattacactcacatgcatatcttgccacaacaatcattattgtgcctcacagagttcagaaatggatgagaatgttgacaatttttcttcctaagcagcctaccaatcacttgttggtactgtgaaaactagccagttgagatgatgtttcctagtcagtaccaaattgagttgtccatgtgttttgatcaaagtgtctggtgtcttcaacaatagtgtcttaacatcaaattctggtggttaactaaaagtaatatcaactaacaggctgtattgtttaggggctctatgggacactgctggtaaacactcagaaccgggatttctcttctggaaatctatggctctggggagaagtatgtcccctgtggggagtaattccaactgaactcttttacctgaaaatatagctatgtctatacattatgtgggtgtatttaataagcctataaattagtattcattcaaatactaagatgattttacaaatggataacttctacctatgatgtcatattgcagaccaaacatagatatattgaaattagcatgtaaaataaacttcaggctatcctaatccaaatatatggtaccatgtagccaaatactactaaaaagcctacacactttagacagttcaagtaaggaatgctcagcttctatctctccatagactgttcatatcttccctcaatgaatccatttaaacatttataaattaatactacaactttcacacagtgttgcatagtttattcagagttaagctatgtactctcattagctaaatgttcttctgtagaactttgaacttcacattctaatttctgaaacatttttgaagactaagcatacatattgtctttagccctgtgtcctcacactgtagcacaggcactaatatgagtcaagaatggtttataggatcactgtttatatcaatctacttacagattaatttaactttaaagcaagtctatcctagaccttcaaggagaaaatagtgaaattaggtctcatgagctcaggtggactctaagattcttaggtggaatattagggggtcaactccatctgttcaggacataattttgtgggaaatcatgttatctcaaatattatcaggcaaaatcaaagactcaaagcaatatcagtcctatgacgcctacaaagaaatggtgcaatatggcgctgatgagcatctttgaaaaataaaaagtctaatgacgtcagaaaaacccacaagccaccatttttaaaataccagcaagttgcttaatttgtatatgtacatgctataggaacattaaaaagataaagaaaataataacatcataaatagaaaaactacaaccaactgctttccttccttctaacattggctaccacaatttttgtgcctcttttgttgttattatatacatattgcttaaaagttttacaaagaaaacctatacacaaaactatatgtttatatatgcatatattatgcatgtattatgcatttatatgctagtagagcccttttccaatttttagattatagatacttttgcaatgtctttataaagaattttttgtttaattttttctttttctttaaactaggaacaagcttcttttacctgtcaatctcagttccctctccctcccctcctcccctgcatccaaccaaccccctattccaacccctttctgcttgccagggagggtgaggccttccatggggatcttcaagtctgtcatatcatttggagcagggcttagactctctcttgtgtttctaggctgagagagtatctctctatgtggagtgggctcccaaagttcatttgtgtactaagagtaaatattcatccactaccagtggccccatagattgaccagacccccaaactaacttcctcattcagggggtttggaacagtcctatgctggtttcccagctgccagtgtggcaaagatctagtcatgggaaaaatagaggtgagcaagaagagagatgccttaatagagggagccattataggtttaaagagaatcctggcactagggaaatgtccagagatctataaggtggaccccaactaataatccaagcaatagtcaagaggctactttaaatgcccttctccgataatgagattgatgactaccttatatgccatcctagtgccttcatccagtatcagatggaagcagatgtagacactcacagctaaatactgagctgatctctggaatccagttgtagatgagcaaagtagttaaagatcaggctgcaggaaacccacagaaacagctgacctgaacaaggggttgctcatggacccgtgactttacaaattattttaaagatgtctagaaatgaaatctgtattccatgtgtgtcttacaaataaatataatctcaagaatgatttattcatgggattgtaagttgcttcagtgggtaaagatgttactgccattcctcatgataggagttcaatcccttgtgccacatggtggaagaaggagaaaacttattcctacaagttttcatcagacctccaaatgtgtgctgtgacatgtgcatgctacacacacacacacacacacacacacacacacacacacacaaacacacacaaaaaaaccttatttttcaaaagaatagcttgctattaaataaattaaaagactctatgtatgaatcttgtaaataagtcaaacacctaaaaacacaattcaactctgagtggcatggaataaattgggtcttggcatgctaagcaagcatgggccacaacaggtcacaattaatgaaatgaattttgtatagagttcaaagtaggaattgtcatagctacctagatttggaaaggtggagaagggtttttagagaagctcttttataagctgtgttttgagacatgaaaagcaatatttgcagaccaaagcatatttgagtggtagccatctagagagggaaaagtcaccaaaatgtgagccataaaacataaacagacatcagtgagtcttcactgatgaggaaaagcatgcaaatataaatagaagagaggaggtaaaaaagaaagagatgggagatggagaattaaagtaaaaatcagatataaattcactttagagttagcatgaccagataaactgataaaaataagaactaggagatttcaggacacacaacaaaatttatacacacacacacacacacacacacacacacatatgcatgcatacatatatatcacacatacatacacaaacatacccacgcatatacatacttatatacccacataaatataaatacacacatacacaagcaacatacatgtacacatatacatacacacatgcatacacacatctacatacatacaaatttacacaactacatacaaatgcaaaatacatctacatacatacaaacacaaagatacacatacacacatacacacacaaaagtcacaaatacatacatgtatagctcatatatatgtataaaatataaacctttagtaatcaaaacagcatggtcctggaataaggcaaatgaatttaaatcattgctttggaaacctcagtgtgaatttatttttcctgcctatgtaaggttaattgacactgaccactttgccttagtgagtgaaagtgagtcagggatgcatgcaggtctctccatctttttacatgactttcaatggagatgaagttaatgattttcagactctttaactaatgagttgatgtttccattttgtgcatactcttgtaaactcctcagaaaacttctaacagtttgagaaattaatggacttcaaattgctactcacctaggtataaacattaataagcaaccaggtagccatggagatggcttacatttgattaataaaattatatttcaaaaaaaaaacaaactaggtaaacatgctaataacattacctgttagatgaagctagtaattgtctcctcaatgaccctcttcccagttcatcttcacaatttcctttcttagagaaaacatgcccttaccaacttttaggcttagtgtaagtaacacttataaagttaaacacacagactcctattcaccctccttctgtgactctaaaattgtcagacagtgaggttgaatgaatccctttgtctgagttcttgcttttcataccatggaactttaagggcttgtggtagataggccactttccaagcactgttcagcagataacaagtgagaatagaattatatttcttttctttcattccagagattcatttattgcttaataatttaatatttcttttcattccttgtcaagtttgactttttaatgatgtattattttctgtcaacccaaattgtatgaaattattcaaattgtagggaataagagtaaatattcatccacaatgtcctagaaacttgaaaatgcagacaagatgagtcactactctcatccactcagagatgttaattggacactttctatgcttcagactctctggtgggtctcaaattagcacatgaaatggaaggtcccccacagaggaattgactgaggaaagagggatcactgggtacctggcagagcaagggtgttcccaatagaaggtacactgatgtagtttgaagattgagctgcctcagttgattgaaaggaaggctagataggagggagggaggaagaatatattgttttagaactgtaaaaaagcatcatgagctacagatctcagataggatattcatctccttaaaaaatttggagacagggagatatgaacacatagctatctgggcaagcaaaaccagagtctagagtataactaatatattgacatgtttctatggcttgggaggttagcctgaggctgtgagacccaggctaatgacttgtaccacctgacagatactccagtatcaaattaaatagacagtcttaggttcagcatcatattcttatctatggcaaaatttttcagtaatttatgtatggcatttaaaacctttatgggcacacttacaatatataaatgccgctctaaaattatgaccatgattacttttctaaccttgtctctgagctgtttcaaaagccatgatatgtaactctcagagagaaattcaatggcatctctaaattccaagaaggaaaaacgggagagacttcagaaagttttttcagtccagctgatgaatgggaaggaacctctgaatgtgtagggcatgagagccttcaagacacacctcctcatggtatggagtgtgctagtgaaaaggatgttctcaaaaacaaaacaaacaaaaaactggcatgaagttcctttattcactcagattacatttaaattaaaatcattcgtatagacttatgttggtatatttaaataagaaataaaatggcatgtaagaatactatctactgtatgcaaaattctatataaatgtggtgtaatactattaaatatttcagtaagatttgtttataaattcagttaacatggcagtaacatgaataagctacccaccttaaaaacattcattccacgggagaaagaaaactcacaaatacctaatattgcatcacttttaaataatgctggagctgagcttggcttcctttagagccacctgctttatagttctcaacagtctcacagacagcattgtcttgatatttttaaatcaaaggaaatgatataaatgtattaaaaacaaatacagaaatgggcacagatcacaagagtttagcaaaatgaattcacaaaataaaaaacaaatcatttattttaaatgtcgagtcagagaaatgtaagaatactatggcaaaagcaagaagacagagccactttttcaattctaacactgctgattacatttgacatatgcacaagagctcctactgttacgataaaatttccgccaaaagcctcctgagccccaccgccatgtgtgagctttatgccagccacctgcctgagttagggcccaaatattaggcccaaatgaatacgcagaaacctgtattgggttcaaagctgcttggccaatgactaggacttctcttctgttagctcagtcttaattatcataaatttatataagacttatcggatgccttattggtgtccctctttgccagtggctcacatcctgccactggaggagacaaacggggaaaaaagggacccttcctgtttctccttcgtttaaatatgagtctccttactatgtcatttcctgtctggatcatcacttctctactacatttcccaaaatcctctttgacttctagtcccgtctaacttgctgtctcattggccaaacagtattttatttaacaatcaataagataaacatacacagaagtacttctcccatcactcctacatacataattttcctcctgtttcttccttttgctgtggtaaattatgcttagcttagtttcattacatgagtatttaataatctatatttgttttgttctatcctaaatcactgatttggttttcatatcaatagatagtgaattaaagtttctgctccactggatccttgcaaatattgtgaatgttagtttatatctgcttaacccgatacaggcatatagtggaaccactttagtttaaattttcatttacttgatgactacaaatgctgagtgaacctaatccacattggtcccatcacagcagtgtctctgtttggagagcatgttagatgtgaagaatctgaggtctcatcctagacttgccaaacaacagattcaattttaaactataccctgctgtggttcaagtgcatgcctcacaagtttgaagtcttgagttggattctagcatgccatgcagataaaaagccaggtgtggtgacacatgcttgtattcccaatggtgtggaggcagagacagtggatccctgggacccctgatcaattatcttactctctggcagcctaggtaccagtgagataccctgtctcaaaaaacaaaggagatggatcctgaagaacaacacacttggttgagctcagatctctacactcacacacacacacacacacacacacacacacacacacactcaaaatactcagaagtaactattaatttatataaataccaatatatgaaacaatgatatacagtatctttttatgtactaactggtaatttgtattcagtatttttttgccagagacatctacacaagatagaagttcatgtgttttctttaaccaaatatttaagttatgaggaaaacaaatttaccttagtttgtagacagagagacatgtctgtagtatctgagcaggcaaacccagaggccgggtgttcagttagtcattgaaatattgttggtgagatttgtggggttggcctgaggctgtgagacctgagataataacttgtgccaccttccagacatttcagcaccaaactgaatagacattcttatgtacagcatcatattcttatctgtggcagaattttcaataatttatgtatgacatttgctgtaggaattttgtccatgccatgcttaagaataagaaaatcactctagtagcaggttcttagccttgataatggtgccaagtataagtttcactaactggaataggacttaaatctaatcagaaaatggttggtgactcccataacatttgtgacactatggcaactgtggctcattttataaaatatttacacaaacatagacagacacacatgtacactatgtacacacatacaccacacacatatatatagagaaatacatacagatacacacatacatacatagacacacacacacacacacacacacacacacacacacacacacacacacacctgtattcccaacacctcacattataaaatattctaaaataaaatactgatacggattttccattaactacttcgaaactcctattctctcaaattttggattgatctaattctgaaggattcttctggtcactcataacttcttcatgacatttccttcaagcagtgtctcttaatttttcgaaatgaaatttgacatatgaatatcattccatcctatccataaatgagcatataacttgtcttttcactagataattcttttaggttagtagaacagtgtcacattgtcctaactttatcccagtatacctgttttttgcagaaatatcccaattcaacttccatcttttgtgatttatttaaatgatttattttacatcctgacaacagtctcccatacatcctctcctctcacttcccttcccacctcccttccccatccatcccttcttcttaattactcagaaaggagcaggccttcaaagggtatcaacaaacatggcatatcaagctgccataagaccaagcaccaccctctgaattaatgctgggcaaggcaatccaattgaaggaacaggttcacaagagccagccaaagcaccagggacagttcctgctcccagctccaggagtcccacaaatagaccaagccacacaacacaactgtcacatataagcagagggcctgggtggatcccatgcaggttcccagttgttggttcagactccatgagttctcatgagccaggctagctatttctgtggttttttttcccaatgtccctgctcccagattccaacaatccctctaccatctcctcagcatgactccttgaacagaacccaaagtttggccatgagtctctgaacctgtctccatcaatcaccagatgaaagctaactgatgacaactggggtagtcaccaatccaatgataggggatggacagttctggctatgcatccacttctgctagaagtcttacagagggccattcttacagactcctggaggtttctcttgcatcaggattctacctgattgtgtaaatcccactgttctagtctcagtacactttcagtactctccccttccacccagtccccagcccaatccctcaatttcttatgcccacctgcctccggttcacccaggagatctcctctatctcctctttctatggagacccatgtttcccctatagagcactccttgttacctagtctttctgggtctgtggattgtactatggttatcctttactttgcagttattaaccacatacaagtgaatatatatcacgcttgtctttctgggtctgggctacctcacttgggtgattttttaatctaattctatacctttgccttcaaatttgctggtgccattgtttttaacagttgagtaatactccattgtgtagttataccacattctctttatccattcttcagttaaggggcatctaggttgtttactggctctggatattatgaataaagcgtcaatgaacatagttgagtgactttctttgtggtatgattgagtttcctttggtatatgtcccagagtgatattgctgggtcttgatgtaggatgattcccaattttcggaaaaattgatttctaaactggctgtacaatttgcactactggcagtgatggaggagtattcctcttactctacatcctctccagcataagctttcattggtgtttttgatcttaggcattcccacgggtgtaatgtggaatttcaatgttgttttgatttccatctccctaatgtctaacaatgatgaacatttctttaagtgttttttaacatttgagatttttttctgttaagaattctctatttaggtcagaaccctatcttttaattggattatttgttatttgatatctagtttcttagattctttatgtattttagatatcatccttctttcagatgtggagttggtgaagaacttttcccattcagtgggctgctgagaagatggagcacagtaaataatcaaactgagagctgaaaacaataaaatgggaacaaagagaacaatacagagaatcaatgaaacaaagagttggttctttgagaaaatcaacaagctagacaaaccattaagcagactaactaaaaggcagagcgagaatattcaagttaacaacatcagaatagaaaatgggaacataacagtagacattgaggaaacccggacattcgttaggtcatacttcaaaacccatactcctcaagattgaaaaatataaaagaaaaggacaaatttcttgatagatacaatatgacaaaattaaactaagaacagatacataatttaaacagacctataaccccttgggaaatagtcactaaaagtctctcaatcaagaaaagcccagatgattaccacacagaactctactagatcttcaaagaagagctaataccactaattattccaaaattaatactcctcaaattattccataaaacagaaaaagaaggaaaattgctaaattatttttatgaggttaacagctgccctgaagcccaaatcacacaaagaatgagattacagaccaatttccctcaagaacattgatgtaaaaatacaaaataaattttttagttgttagccttgcttttaatggctgagccatctctccagcccaactgagaaacaacctagatgcccctcaactgaagaattgataaacaaaatgtggtacatttacacaatggagtactactcagtgggaaaaaaacaatggaatcttgaatttctcaggaaaatggatgaaacaagtagaaaccatcctgagtgaggtaacccagtcacaaaaagacaaacatggtatttactcactcatatatggattttttacatagagcaaagaattaccagtctataatccttacttccagagaagctaggaaacaaagaggaccctaagagggacatataggttcccctggataacaggaaagggacaagatcaccagagcaaattgggagcatcggggaagggagaaggagttaggagatatcaaaggggagaaaaggaggggggaggacacgaggaagtaggaagattatgcatgtcaccggtataccacacaatcctacgggacaaacagtggttgagagatctaaaaagaacactaaaggagatgctcaacaaacaagcttggaagtctaaaccccccaattataggttgcataatgctttataaactttcttaatgccaatgaaaaaggacaaacagctgcagaaagacactggactacggggaaaaaactgctgaactcaatcagccagcattcttcacagatgtactaacctctgtatggaaaccaagacatgtgttatgatggggtaggggttttgcattggtttccacaggaaaagaaaaactttggattccatcaaagttggtcaagattcgagttgaaaaggaaaaacccctcgacaaggagaaatgacaggtattctactaaggtatatctcataaactaaatagacatctcccaaaggaaagggaagtggttttctcttatcttcaggaaaactcatttacagaaggcaaaggacactgcatgggtagatacttaagatgagaaggtagctataactgccaaaaaaaaaaaaaaaggaacatgccatacaataaactttacagctgtctctcagagaactctatttctctttttctagtccctattcaattaaatcaatgctggatttagaggtggatttggctttcctcctctaaaatccaagcatgttatttaactaaactttagagtttctgtattgtatcaagaagccaattgatgtaatacagaataaaagaagaatttggggactatctgtctttcttggctctttctttcaaggtgtacaccctctcataattgttatgttcccaaggttgccttccccaacacgtgtacatacacaagtaaacatttctctgctaactgtttatgtttgagtcccacacagccaatgaagacctgcctgacagcgatccctggacactctggaaagaaaatgggccacacatccttgactgcactggatccaacttgctccatttcaactgacactccggccaaagcttcaggtactgatttcaatcaagttgaggatttcaggcgagatcttcaatcaagcaaatctcatctaacatggactagatacaatccattcaagacttttactatactaacattttttcctaccccacaaggctgtcnnnnnnnnnnnnnnnnnnnnnnnnnnnnnnnnnnnnnnnnnnnnnnnnnnnnnnnnnnnnnnnnnnnnnnnnnnnnagaatagtgtatatacctagttagggatagcttcctattgtttattgttgggattggaaggaggtgttcaggcttgaacacctctttcagatgactttaggatttagttaaaatagatagctatgatgtgacataagcaaattgttgtatcttcttatatttcacctttatgattgttaattttggatactttacactgttaagtcttaatccacttttagactaaaaggggaattgtaggggaagcagtagccatgcctaatagggctgactacaggtgcatctgtgtctgaccactcctgcaagggcgtggtcagggtgatgtagagtgagagtttcaggtggctgggtttcgctttcagtttcactttcagttttctttccggcttgctgtacagactgctgtcatgccggctggctaggctgctctgtaagtaaggattttccctattaaatacccctatatttctatctggctccatagtggtaattttccactttaggagaatagaggagagcaagaaaagagatacttaatagagggagccattataggtttaaagagaatctggacactagggaaatgtccagaaatctacaaggatgactccaactaggaatctaagcaatagtggagaggctaccttaaatacctttcccctataatgagattgataactactttatatgctagcctagagccttcatctagtagctgatagaagtggaagtagagattcaaagctgagcactgagctgaattactagaatccagtgcagagtaaaacgtgatgagcaaaggggtcaagaccaggctgaagaaacccacagaaatagctgacctgaacaaggggaactcatggtctccagactcacagctagggaaccagcatatgaccaggcccctctgaatgtgagtgtcagttaggaggcctgcacagtctatggggcctttggtagtgaaacagtatttatccctagtgtacaaatggatttgagtgcccattccccgtagaggattctctcttagcctagaaacatgggggagggcttaggccctgtgcaaaatattgtgaaagactttgatgatcccccccccaatggaaggcctcaccctccctggggagcagaagggggattagatggtggttgggagggatgggagagagggagggagagggaactgagattgatatgtaaaataagattgtttctaatttaaattacaaataatctaaaaaatactcaatgaaatactgacaagctgaatccaataacacattaaagaaatgatccactatgatctagtaggcttccacagatgcaggaatggttcaatatatgaaaatctgctgatataagcaaactgcactatataagcaaactgcaaatatgcactatataagcaaactgaaagaaaagaatagcacatcaccatcttatttgatgcttaaaaagaaacttttgacacaatccaacaccccttcatgataaaagtcttggagagatcaggggtacaaggaatatacctaaatataataaaagaaatacagaaaaagccaacagccaacatcaagttgaaaggattcaaagcaattccactaaaatcaggaacaagtatgtctactctctacatatctattcagtatagcatttgaacttttagctagagcaattggacaactaaaagagatcaaggggatacatactagaaagaaagaagtcaaagtattgatatttgcagatgatatgacagtatacataattaactctaaaaattctttcagggaactcccacaactgataaacacttttagcgaagtaactggatacaagattaaatttttaaaaagtagctgtcttatacccaaatggaaaaaaaatcacagaaacaatcctcttcaaattagccataaactatcttataaaattctttatagagattcaaagaacaatactcaacttcatatggaaaaacataaaacccaggatatcagtcctgtacaataaaggaactgccagaagtatcaccatcccttatctcaagatatattacagaattatagtaatgtgggattggccataaaaacagattccttgatcaatggaatcaaatgaaagaactgaacataaatccagacaactatggacacttaatttttgacaaagaagtcaaaactatacatgaaaaaaagaaagcatcttcaagaaatgtgccgttataactggttgttggcatatagaagaattcaaatagatctatatcaccctgcacaaaattcaagttgaagtggatcaaagactttaatataaatacagatacactgaacctgatagaagagaaattgaagaatagccttgaactcattagcacaggagacagtgtcctgaacagaacaccaataacaaagacactaagactgacaatcaataaatgggactattgctggaggttccctttgtcccaccagtttccaccactgcttcagcacaaataaacacagagatgctatattaattgttaaactgatggctgatggctagggcttctgattgctagctctgacttaattattaaaccatttctataaatctatgtatttgtatgtggtcttgtcttactggagaatgcccagacctgttacttctgtgtagtctacatgacaactcttctggtgggctccctctgcctatctttctcagaattctcattgtctcttagtccaacctatcttcctgcctctttggccaaaccgtgttttatttatcaaccaataagaaaaacatatatacagaaggatatccccccatccaaggacctcatgaaactgaaaaaaattcagtaaggcaaaggcccattgcaacctctcaaaaactattattagaaataaaattacatcatgaaatttgcaggcaaatggacagagataaaaaaaatcaccctgagtcaggtaacccagacctagaaagataaacacgctatgtactcactcataaatggatattagatgtaaagcaatggataaccaggctgcaatccataggcccagagaatctaggtaacaaggaggaccctaagaaggacacatggatctccctagtaaggacaaatacataagacctcctgggtaagctgtgggtggggagtgggtagatcagaggcaatggggaatgagaacatgagaatgggatagttgagttggtggagggatagagagagagaacaatgaaagttatatcttgatagtggggtccattatgggtttgaagaggaacctgatgccagaaaaattcccaggaatccacaaggatgaccccagctgatactcttagcaatagtggagagggtgactaccctaattgtcattatggaaccttcacccagtaactggtggaagcagatgcagggatccacagcaaaggactagactgagctccaggagtttagttaaagattgagcaaggggatataagatcatgacagaggaaccgacagagacaacagacctaagctagtgggagttcacacactctggaccaatagctgaggatcctgcatagaaccaacctaggcccactgaatgtgggcgacagttgtgtggtttggtctgtttgtgaggctactgacagtgggaccagggtttacctttggtacttgcgctggctttttggagtccattccccatggtgggatgccttgctcagctttgatggcagaagggaagggcttgctcttgcctcgacttcatatgtctggctttgttgattcctgatgggaagccttaccctttctgagtagtggatagggggtggacagggaaagtgggtggtgtgggagaaggggagtgatgggaaactgtggtaagtatgtaaaatgaataatttaaaatgaaaaagaaatacaaaataggttctgccatagaatttgtttttcctttaaaattgctgatattcttttttctgatactgtctttcacagcaactgatcaaactcaagacagcctcctacagggacagtgttgcaatattttgttaggcataaatgactgtctagactgtttacttgcataatattttcacagtgctacaccataattataaaacaacatgaattacatcaaaagtttaggtttacagtttattattaatgtttatataatttgtgtgctagacagggtttccagcatgaaggatcatgagcatactaactttagtatctgaaatggaactctgtacaacctagccctttctgttgttctctctgagaacacatattttgtattgagggctgcagcatcatctctgtttcacaatgaataaataatcaattaatacaacatatcttttcattcatttgcaagtgaattttgttgacagtggatggtaagttggaggttctctcaattgacaaagaacccaagagtggtttaagtgtatctctatacaatgtctctattagttgttagatgaaaaataggaaattgtacagtgaacaaaccagatatcagaattacagccaatgaacgcatgtgttacagccaatataattttctaagaaacaagcaacactttcccggtgttatgccagtcaaaaaatatatattgcaaatctaataatgtagaagaaacatcacagaattgtgaaacatcagtaattaaaaataaaacgcaattatagtttttaaaatgtcaatgtcataaaaagagccaacaccatggtaataatgttccagaatttgaagagtctacaaattaaaaactatgtgctgaagagatagctcagtagttaagaatatctgcagctcttgaagagaaactaaatttgttctcagcaccaagttccagtgggtcacaagtgcctgtaactccagctcttatagatcacatgcccccttccagcttccccaaacacagactatgtcccgaaaacagacccacccacagacatatgtaaagataaaaccaatcataaaaatataaaacataatttggtaaaatacctctaaaatgtactgtgacaaaaaaatgctgaaggtattcattcaaggaaacactgaaacacagctcataggttggataaaagtcatttgaatactattaatttcttaaagttaatatctgtgctgtgcttatataaaaatgatgcaacattcttagaaaatgcaaagaaatatgttgtaataaggaaaccttctttaactagtcaaatgaagccaaagctagtaagggttaggcctgcatgcagggttgttctcagcatgagcctccttacagtccctgtaagactgaaatgccttcaagttacatttgattacaacagaagcataatgacgctaaaacccaaagtatgttcattaagtatcgggtatataacacagtaactacttaaataatattattttaattacttatcataacagctctcttagggccttgtattgccttatttctacaaagaaggcatttctccttatgcagtattgagtggaaagtaattggcaaatattaaaacttaaatagaacagaatatttacatataactaattaacattttgttctcttaaattatatcattcaagattttagaccatttgtttcagggagacacagaggaacacaaatacacacacacacacacacacacaggcatatacatggcacacatatacacacctatgaaatttttctatgtcatttaaaaataatttcctaaaatctacagttcagaataaaaagaccctgacataccaatatctgtgactctctggtctttctattgtattttccttctaggacctcatattgaattgcttatttcactcccctgtgagcaaaagatactccttttctaaggttccaatctccagtatttttacaattgcttgtgaacaaaccatcacaaagagttgcccaaacacacaaagcttactcgtaggaaaaagttccagtcattgatgggcccaagagtctccttatggagctgattcaagaccatgtgactaagcactaccaatgtctctctgctttgtaatgccatggcttttgtgcaaaacaatgcttgtatgaaaataaaatgtttcagaagaaaagagagttttaaagtggttttccttgagatttaaggaaatggttattcagaaatgtgtaagaaacaagaaaaatacatcctcagaataccactctatgaacaaataataaagccaaaatcacttacagtaattttcattgaatattctagttgcatgcagccagaaattgccttgaagaaatcactatatggataaatttgaatgggtcacaagtttctggtagcaggcacatgcacaacaaatagtttccacactaccatactacagtaattaaatcaaattgatgtctttaaattttaccgtactgatatatttttggcaaaataataataatattttttacatcactatagtttttataagtttgtcataaaataacaataagctttaaaaacttcattgtgtacatgatattaggaatgagaaactgagtatagtcttgggaatgaggaccctgggaaagggatggtcaatatgttgtattcctgtgccttgtcacgtgttattttctgcttcattttcatgtttcaacacaaaccaagccacctgctcttctccaggacacatagattactggggagtatgcagttctggctgtttattcttttgggttgaaatttgttttgtttgtttggtgcttatatcaatacttttgtgcttttgttttaatgtaatctttgtattcctgggtgtgtgaatttttaattatgaattttcacaagcttctataggtattttatttccattagattattctagaaaactccttttgccagttttattttccattatccagttgttctacacagtcttattctttgccttcttgctttgcagggaacctgggatattgtaatagttgcagaaatgaagtaacatccatggatatgcataaaggtaaatgcagatggtctctgtttgccaccctgaatctgaacataataagtctaaacaaacagtagttggttccagaggtccttgcatacaagctgtctctttgtatcaaatatctgtaaaaggacacaaccctggactcactgctaactttctctagtaatcttttaaagtctctcatatatttcctaagctgacatgcagactcttcataaaattctatagtcctttctctttttgcttctgcaggctcagtgtcagattccaaacacaggtgctcaattcttcacataaggaccttttagtcacacagttcttgctgtatctcccactggactacttacagcacaaccaaaacatgtgttatagacattcagacttcataaaccctcttcaaaggtctacttcattgagaataatactttgttattagtagatgttttctatttccatgaataggagcatgtatgtacttttcttgttgagtacaggtttggtcattcacattttattttacccaatgaattatgtgttgcttgtgtcatttctaggtaacaatgttaagagccaccaaagggaggaattcacagggcacatttatccttcttgcaataccctagacaatgtttctaagcatgagtgtacggacaccttgctgtgcattatccataaagatttggagacccagggatttacagtgtaataaagcatcactagatcaacatattcaactgtctttctgctcttttgatgctagtattagtgtttgcaagtgactgggagagtaaacaccaaagaaatacagataaagggggttttatagatggtgaaatggaaaagaacaacggcagctgaaagagccaactggagtttggttcctagctcccaagattggcatttcaaaacttgcaataactccagactcagagaaatccactgccctcttctggcctctctctgagcagctgtatgcacatgtatatacacactgatgcagatgcagacacacacaagtaaaaactttgaaatgatattttaaaagaaataaatttgtaggcaagtacataattacctctaatggagaaaaatggacagttgtccttgttgtaggaatgtgcttcttttgggtatatgcctaagagtggaattgctggatcttgtggtagactgattcccatgttcctgaagaaacaccatacagatttccaaagtggctgtatgagttggcactcccaccagcagtggaggagtgttcccctttctccacatcctctccagcataaattttccttggtgtttttgattttagccattatgacaggagtaagatggtatctcagagttgttttaatttgcatttccctaatggctaaggatgttggacactttcttatgtgtctttcagccattttagattcctctattgagaattctctatttagttctgtatcccactttttaattggattatttggtgttttggagactagcttcatgagttctttgtaaattctggagattagccctctgtcagagttcataacagcattacttataatagtcagaacctggaaacagcctagatgcccctcaactgaagaatggatagagaaaatgcagtacatttacacaatggagtactactcagcagggaaaaataagcaatggaatcttgaaattcgcaggcaagtggatggaactagaagaaaccattctgagagaggtaacccagtcacaaaaagacaggcattgtatgttctcacttatatgtggattttggacataaagtaaaggattgccagcctgtagcccaggtggcaagagaggctggtaaacaaagagggccctaagagagacatacatggtctccaggagaaggcgaataggacaagatctattcttgagcaaattgggagcatggggagggagggagagggaattaggagaatgagaatgggagaagaagaggggtgaggaagacatgatggtacatggagtttgagttggggaaagaacagaagagagcaagataagagataatataatagagggagacattataagttcaaagagaaatcagacactaggcaaatgtctggagagctacaaagatgataccaactaacaatgtaagcaacagaggagaggctaccttaaatgtcctctcctgataataaggttgatggctaattcatatgccatcatacagccttcatccagcagctggtggaagtagaaacagacaccacagttaaactataaactgaactgaaatccagatgcagagaaggaggagtgttaagcaaaggggtccatactaggctagtgaaacccatagaaacagctgacctgatcaaggaaaacctcttggcccccagattgatagctggtaaaccaggatgggactgatccagaccccctgaacctgggtgtcagtgaggagaccttggaaatctatggggactcttatagtggatcagtacttatcactaccataggaatggactttaggagccatcccacatggagggatactccctaagtatagacacaagggggttggcctaggcactttcccaaagaatatggcagattttgaagacccctatggaaggcctcaccctccctggggagcagaatgggtataggataggtagggtgttatttggggggaagggaagggtgggagggagagggacctgggattgacatataaaataatttcctttctaataaaaaaagaaaaaaaagaaaaagccaataaataaataaataaataagaaaattgggaaatattaaggaatcaattaaacaacataagttgttgctgcattggtaatagaaatccataatataataaaggagtctgtagcttttgtggaggaaattaggaagatattatcagggaggtcaaacttatatcaattaaataagataatctgctagaagacacttagcaatccctcacatgttgtaatataggaaatcaacaatgacaagcatgacagatgcacacagttgctgttgtctttagacagactattgtttttggattaggttcttagacatgaaaactccaggagaacacagttgaaccataaataaataagacacacagcaagcaggttcatgtagctgaagctgccaaggtagatcaaatgggggattcattttctattactgctataacaacacatcgcatgcctcacaacttaaaatgatacagacctatatgatcttacagttatggaggtcagagatccaacagaaatttcagcacactaaattcaaggggtttggagagtggcagtctcttcaggacacttggggaaagtctcagttcttttacttttcaagtattagaagtggaaatctgtgtttcctttaattcttgatatttaaagcaagcaaagttggttggatccgttccattctatttatggactctaacctccaaaacatcttttccttcctcttattgcatggggcctacttagtaatacaggtaaatctactattgtaagacatgctgatcgacaactatcaatacatgcgtaatcttgatttctctttactgtgcaagtgagaatgctaaagaacccctgaataatgttgtagttttagaaaggacttgttgtgattaccacaggagacaacctgccttccagtcataataagactgaggaatcatcagcttccaggagacaagaggaaatcagatgtttcaaaaaccgacagcaatgccctcacccctatttgtcaaggtggctctttaatcccagataaagcacagcacagatctacatcatttgctttacagatatgaacactcatgtgaatttctacacgtggctcttgcacaacctttatttatggcatagtgactgaatactcaacttttgttatttgtggatctttgcctttgaaagcatctgcatggctttcatctctccagagtgctaagggctttatgcaaaaaaaaaattataagggttactggtactttcagagtgttgcagccaactggaaattaaaagcttccctctcaacctctacttcaccttctgaagcaacctgaagacatataatatggggtctgacatcagggaatgacagcaggtagaaagctctgcaaaactattaaatgctatcattgtagtctatttctgaaaatattgacaacaaagaaatattattaactatcactagctgcaattcccagaaagaaggcaatgaccaggaagggatcggtgtgtaaatgaatgcatatttacatcaagagaagtcatttcacaaatcaaaacaaaggctgccttaaacttctccttgataaatggtcttggcagcttccaaataaaactcttttattaataatacataggaaaactgaagacagaagggggaaatagtgttggcctctcagaaaccaactttcctatctaggccatgaaaatgcaatgctatatctgatcaaatctgttcctgaaaagaatctgaaatatgtcctaggtattggcagaaagtctttacttggccaatgtaagcactcccatgctgcttacacagacatctctggagcttaattgttgtccttgaggtatatcttaaagataattgtatgttccatgatgtaccatgtgcacagtgtaccaggtgaaatccaaattattgcataacataggaaacccaaatactttgtacagagtgagaacatctatttagttgacattgtatttatctagaccctgcttgtcttttacaatagagaattctatccgattttgtgtcttggagaagagttgtataataccttccaaagtttatttgcattgcttgattgtttttgtaagaatcctccttctgtttctacttatttttctgaatttgtttctgttcatactaaatttagttatatattggcaagcccattaaaaattcacttttcctttattcatttttccttttttaacatactatgtttgcacattaaaattcctgtctacaatcatctttgaagcacagatgagcatgctgaagaaaaattaatgaagtgatcttatgtgctactacatatgtgctactatttcacagaaaaaaggtgatagtaggacaactgaaggaaagcttttgaatgaaatattttttaaatgcaagaatgtacagatcacagagcaggaagagactttgttctcttttgccaactcccatcaccgttcctcatttgctaaaagcactgcatcattagtttcccaaaaccattgataactttcctctctgttacatgagatcagaattccactaagccagaaaggagaaagtcaatgtatttaaatagcataggattcattttaatttgcattcttgtgccattgggtgcagtagtgactgcttgtattctcagtattttggagctgcggtaggagaatcatgatttccagtctagcctgtactacagggtgaaatcctatttctcatctatctatccatctaccctctccccttatatgtgtgcttgtgtgtgtatgtccatgtattaagatgtacccgtatttacatagaaaattaacttatatgttcatactatagtttgaatacaacaaaaataatctgaatgagtagaattatgcacatctctaccttgcataaaaagaaatctattgttcttttcctttgctttctcaaattttctttcttgcttatattaattaaacttctgctttgactttggagttcctgtggtcaaggaaagggagggaaaagaggacattcaatagatccaaatcttgacaagtcctgtatgaagaaatggaggctactcttctgcctagccagtttcaagttgtgagaatctgtaccccagtaaccacacagctgcagagacagagaacaacaatgggccaatcaagcacttgagaaagacccttatttcaccttggaaaaatattttatgtaattgatttcttgtgccagtactttctgcgaaaatcattgtatcccagttttatttatcctgaaatacaaacttcatctgcaacctgtggtatgctgttactccaacaaaattcatctttctttttccatataaattactcagttctctgaagaaaagataacatctctgaagactaaccttagacatgaaggggatctctttaagacaccttccatgatttgtacagcaacagcaatacaacataagatatactgagcatccctgagacactaatgaggcattgaaagcacatagaaacagtgtccttctctaaatgcaaaatcaacagctaacagagacaccagccagaaatgtatccttcttagcagaagggaccaaagttatttctgtcacttatagtaacatcacgttaagtgagaaaaaattacacaaaaatgctcagattaagaaacaagcccttattcagggtcatgccctccaaactgtatggtacatcaaatatagccatcaatcatccaccatagattcccattcattgtaacatcctctggttatatcttttgtattgactattgtatgcaaataaatcatgactagtttcagccacaatcctgacagatacagtaaagtcagagtggaaaaatgttgccaataatatgtatggaagttggttatgatatgatctggagtctaaaaccagagactctgaagtcagaccagagcttggtttgttctgaaagggagtacaactccattagaagatagataggaattgtatacttaataacatttccagtgtaagcatgttgcagactgcactgggttctttgaaattttcatcttaatctaggaatagtctctgcttacttgcttttcaaccattatcacagctcccactttctccttcatatacatatacaattcaagtcaaatgtcacaacctctagtgattttgtgagtttccatgtcacagcacattgtactaccattctttttcaggcaatggtttaaactctccttccaaaaatgcactgataataatcttatctgatataatgttttatttagtcttggttctgaatatctacaagatatggggacctcacaatgagcattgtaactgcttcttcccatgcttcctcccattcatgcagacattccacacagcaagcaaaacattggcttattgaagataagagtacgtgactttcaatagagaaaagctgattgtgtagctgtataatagggttcacaaaggttcaaagttaaaaggaaagaaattaaacatgttgttcagtaagacgactgagagaataatagagacaggagcacctgcagctggataagcagtcagggtcggcagatgggacaaggaatctttctattaaaataatcacttagcaaatggatgcctgcaagttccccacaactaagatatgaaaacatgatggcaacaaaaaaataaataaaataaaataatgaccctaccacatgtaaacaaagtagctactctctagaaaggaaaaaccaatgggaaatgaaaagaatgacaacacttcagtgaaggtagatgactcaagtgttcagaaaccaacttttccatttacaaaaggtgcttttatttctaccaaatcaaaaatacccaaggttccaacaaaaaagatttatttttttaactacaaaaggaatgacatttcatagaaactgaaacactttgttttgcaaggtgtctactctgagccaaacacaatttaaggcaccagagacataggagatattgaaacaacatcccaggacttacagaattactggcattatttaaggcggtagacaaggtcaaatacacaaattaaaaattaagtggttacaagtgctaggatcaaaaatgaagttggtgggtaggaatcttggcgatgtgattttgtgcatgtttgtcagagaaactcacaccaaaagagtgctacttgtctagtaacctaaagatgtaacagaacaagcaattgacaactaaagaaagtcaagaaccccaagatttagttttcaaaagacagaggatgcatttctgatcatatttgttcactccttataacttttgaagagtaagttaaatatggcaatggagtgtatttctaatcagtttgtctaatcccttaagttattataaaataatatagatacagcgttaatcacattccaaacatattacaggaaagcttatcattgctcacacagaccaaaggagatacatgtatttagtctttggttctttaacagtggccagttcggctatttagaaaggaagtagaatcacaaagttgtgatataatagtaaccatccaaagtagttgttaaaaattaatactgaaaatgttgacaatataaaaataattggcctttcagatcttatgatttaagggaaaaggagccactgaacagaaaagtgatgaatttttgggtttcctccatagactacaagagagtattttctatctattcatagttgacaactgtgtttttaccatgaaactcttgataaatgtaaacagatccctacccaataaaaatcctctttatttgtagaatttacatgttttggacctgcacatgccattaatatgcacaactcttcccagagccaagtggcagatgtaccatgctgatgagaatgcctccctgccttccagtctccagttcatgcctgaattcacaacacctcatcaaaatgctctgttggcatggtctcttctagcagtggccaaattatcactcctaaattcacactaacaggacagccagacagacttttgaccatgatggttcatcatgggtgctcagagataacacatcttaggagcagagtagttcaaatggtctttatttcagaaagctctaagaggtgatgagcaccataaccattagtcttggcaaccaaacagaagttagggtctcctgggaaagaggcctcaggtgcttgtgaagggtaatctgactgcacactttgaggagtgaagaaaggtctctgtaggtggctcgattgcctggctgggacatccaggacaatcgagggttacttgggacaagaaagggagccaaatgcaagcttccttcagatttcgactcctgaaagtggatgcaatgtgaccagctgattgaggctcctgattcctttatgtccccagtctaatagactgtgctctttgactgtaagtcaaaataaatgtttcctcctttaatttgctctttccagtgcattttatcttagcaatggggggagaagacaattaacactatccataaattgacttctaggtcaacacttcggtctgatactattggaccaatgaaattcaaatacagctacaatcatttctgtagctagtcaccatgaacatcactgacaaagaaataactccccaaccccctggagctgtctccctctttatctccttagaagaccttcgatattttattttcccttgtcttctttttcagagtcaggtcaacccattttgttccccccagacttatcagtttcaatatttcagtgttcttgccatgtcattacagttgctgccttttgctggcagaagcaatcctcagatctgtgttattcctttgcctttgttatacctctgtgaacttctagacaacaatgaatgcaaaactgaacataaattatgctgagctttctctgtctgtctgtctgtctgtctgtctctctctctctctctcattctctctctctccttctaacagctatctcattttatgtgagactgaaattcagtaatattaagaaaaagagttgatttcaaaattctcattattcattctcctatgtccataattttttcttacaaaacatgaaaacgaaaagaaaccccatgattacaaatgaaaacattcatgaagtcagaggtagctactctgctaaggagccactatgtatagtgagacctgtccccatccatgatccagattcttgttattttcatgtcttgctccagctagtttgcaccttttgcacctttctttttctccacaatacgcatggattttttaaataattgtaattaacaataatgaaaattatcccctgttcatttactacatgctgcttattaagtagcacatccactagaactgctatttgactcttggctcttgttagatgaaagagattaacacaaagctggttttattttttaattttttttagttattttttttgtccaactgctccagaccatgattagcaggggcagggtccatttaatgtttctgatagttacaaaatacaactagcaattgtgtattttgtataataataatactcatattttaataactatttaaacaaccatgatcattgtgctttaaaaataaaacacataaagacaaaagtgcaataaatataaatatatacatgagtgcttggaaaaacactattctcaaccctttgaacctcttaagaaagtaagaatggtcacagagactatggcaacatgcacaaggcctgcctaggtccaagccagcgctagtgctgagagaaggaagcagacataagctcctgtctctaaccaaggagctacctctcactgacaaccacttgaaatgaagaattggattttccccaacatgcccagtatattactgggtatattagcctcacctaagggtttatatgtcaccacacccggcagtagttggcgaacacaaaatgaaaggtactcctggagaaattctatctcattttttttttttttttgcagttttaacttactggtcttttgcttgtatattggaacttccaattttgtggcttttatatggtgtggtgtagtgtgtgtgtgtgtgtgtgtgtgtgtgtgtgtgtgtgttgtgttttttctttttcccctttcattgttgttgtcaattttcttttatgcctgtttgttttctaaagagaaaaagaaggagtggcattagatcgagaggtccagaaaatctgggaggtgatgaggacaggaaatctgtaagtagaaaaataatacaaagacaaatattttcaataaaaagaaagacaaccataatgatttaaattatcctattccatattttaatgaaatatattacatatatacaaacaggcctatataaataattcaatatgctaacttgaatagaagggaagaaaaaaattactgtcttaggtcagacaaccccagaaacatagtcagggaagtcagatttgggcacatgcaccttattaaggagaaagagaaaaagatgggtgggtctgggcagaaatgggagcaaaatgaagataatgttattcttagttggagcccaccttccaccccagtctatattgggcttcagagtttcccatgtagtgcagtcattactgggtactggtgcatgctgatgattgaatgtggataaggtaaggtagaaataaaatcacttcgttttatgttcatgttaattcaatcaatttttaaaattggcctcattctaatattggaaaatctataagttaacttaaacatgtgatttcactctttcaaccttgatgttctgaatcaagttttcccagtgaaggactagtatctaattcataaatgttctaagtttaaaatatagacttgaggttgaagacattaaaacacataaattttatctttctaatatttgctacatgctaaaagaatattttcttacccagtgttcaatagccaacaccacaaattcacaagaaaatttaaatttggatgcattatataataaaatgtatcattaaaattaaatttacctattcccccttttaaaaagcctttttttcataagctactatgaaattgaaaattgtattatatgtttatagcagcagtgttttaaaacattcctctgcaatagggttttatgtgatgatggaaatatactataccagcatggcctattgcagtaatccctgtcatgtgtgacccttgagcccctagaatgtcactattgagtcttaggaaatggaatcttaattttaattgtttaaaagtgcatttaaacctacccctgtggctcatggcagccatatgagatggtacaattggacagaatactgaaagattggtcacattaatgtacaaaggatcagggtttttaacttcttgaaagttagccatggttatctataaaaggctgccaagctcttattccagacaaagtcagttctctgcaggaacatacttgaacagcaagaagtcatcattcatggtggtatgggctaggtaaagggaagagaggaggagcacattcactgtgaaaagtaatttatatgaaaaagaattggtacacacacaaagactcatgctaaaggaaagttgaaaagaatacagagtatctaaatatttacatccatcaatagaattattataaattaagagctgatataatatgatatattacgacacaagtagatataatatgacacaagtagaatgggtagaaattcaaagagcatattgctacctttcataccatgattttgtgaaatatatgaaaatttgggaaagtatgcattgaaataaaaaggccacttttaggcaggcatagtagtataaacctatagcctgatcactagagagaacaggtagaaacactatgacatagtcaaggacaggctactcaaaactatacaacactgtgtcaaatagagacctgaaaatggtagagagatgataactttatgtggtttcctaaaggagtttgaaggaagaaatagggagtggacatgactcaaatacattgcacactttctcaaagaatacatttttaaaacagcaaatatttcaaatattttattcaaatggaataataattgtatgttaaaatatccatataattctgcttcaaaatcccttatcagcgagatacagtgtggcatggctttaatgccagcactcagaaagcagagacacacatatctctgagtttgaggtcaggttggatacctagtaagttttagggcaagtattgaggcccaatgtcaaaacaaaacaaaatcaaaatcaaaaatttaaacaaaacaactgtagaacattataattttcattttgttttatgtggacatctgggcttcctcttgtcctgcactagtacttgcaaactggtgccttaaacttgagaagggaagaagaggaagtatacagaggtcatgagggagttgagtcaggtgaagaatagaagaaacggtatgtgataagtagggttttattttgggggtgtggtaggggaggaatggagggagaagggaactgggattatcatgtaaatcaatcttgtttctaattcaaataaaaaatgattacaaaaaaactttggggcagataaaattcccagacaaacaattccaactcaacctttatctccaccaagaactattaggtgggcaaatttattttaggaatgaggagtaagaaagtgctatgattcacaatggcataacccatcatctccagttaaattccaaggacattctaaaagctactggctgagacatggacataaatgcatgcatacttacatacacacacacacacacacacacacacgcacagatcattaggaaacccagagcaccagtatgataatacaaaagctatcaaaattgtacatttcaccaataagctcatgtcagctagttttcagtgtaaaatgtgatttaaaactctattcaattggtcacatgcatacaattacatacatatattaataatagaacagtggaatttgtagatatacatttccatataatattagattagaaaagagtgcccattgggacttaatgaccttctaatgctttcatcatgaatacagaaattataataattgacaaagaaaagatgaaaatcaatttagagaaataagtgcttttcttcatatactgcagtttcagcctgagtcttcatgagtggctttccttgggcctagaactgcaaacccgtgggctgttctttcacataggaattctaataagaatataaattatttttatactgtgtgaacaccatatttaaaaacaagtccatgaaagctctcaggttcttagactcaagagtactccagcttcccccttttgatacactgaggttgttacacatgttttgtggaaaagaattagagcaggtctaacactcacttgccttgagcttgtcctgaaagacaacaaagcatgtaaggtacaaagaaaaggaaagcagattgccatctcattaggcagatgactgaaaattcattagaatgtgcctgtaaatgtaactgcccctctacttcacttttgctttccttaggacctgcatattctgaacaaggcttttagccgctgtataaattatgttttccttagaaagaagcaataagtaatcagaatagcctcagcaggcagcagtatccatagaaagctaaatttatggggaaataattgctattaataattataatgattgctatgcagagaaaaatgccctcccctgaagccagctccttatcttatactgtgagcttcaaagatcctggttttcagttttttttcagtttccaacaaccacttaatttatttccatgttgatactggaaagaggaagaatgtcattttgttagatattatgggaggggaaaaagacaagaaatatgtcccacaccttgttttaactatctggttgactgccaaatcctgaaatttttctttatacaatgcttttgatttatttttcacctcagtttttactcaactctttgtgctgaacatagttccccattctaacatacttattttgagcacatgggaagaatagtcttggctatggacacagtgtggtcttctgttacaagaaaacaccagtttgccttcaagctacaatattatggctttgctctgccttctctctaacagaaagaactggagattgctttcatgaatgaatatttcacttatgctcactgctgtgcacaagcaagaaaatgtaattttgcaagtacagtatggatgttcaatgtatcatgagtgggtaatccagtgtaaaaggatgggctaaaggactccatgggctaaagtagatgttcctggaggggccacttcaagattgaaatgtggagtcagggacaaacacatgaaaacctgggacaatgacttcccttccacaggtccctagttaactttcctccgtctgtcatatgaaaatgaaaacatgagacacctctttacatacagataaaaatgaatttatcaacaaaggaaggcaataaatggctactaatagggattaaaaaatggcccaaaataatttggttctgtactaactatatcccattgtctctatattattgactttctaataacactgtggtaaaccagtgtcttccctccaaaatttaatttccatctaaatatgaatcattaatccctgtgtttccttatactccttattgcatataatatgtttcctcaaatagactatatgtatatatattgtcactggggtatatcttgcctacaatctcacaggtttgcaaactcacacaaaagaacaaaagaatgaaaactaagattctagggatatcaatagtcaaatcaggcaacatgctcacctctaagtgatcccttttgtaccaaaaattaacagtgtcacagaagtggaaaaattatagaaacttattctggaattagactgagtgaaaataaggcagcatgcagaagttttttttttttttttttcattcaataaatatcttggccactgatgctggtgatttcagggacatcttatttagtccacacaacactaaataatcagagaatgcctctggcttccatgtaaatgagactggtgtctggggagatagaccattcatttccagagtagttttatatttcttttctattcttctggcattctattttgaactgggtgtcatcccccataagtcttcccaaatttcagatttataagtagacttgtggccaagaggataagaaattgacctgaacatgatgcttaaatgcctggcacagacatgcagaccaacttcaaaatgaagaatgagagtaagtggaataaggcaccttcgtagctttgttctggaggaataaaaacttagaactgagtaggaatgctttacaattattcttaaaagactgttttacactatttagatgattagtacaaataactttttcttagcataaattcgatatttaatatatcttgtactttcttatttcttatttttgcagtgtgtgatcacatagtttatagtcaacagtgacagaggtttacacctgaaccactgacattaatacgtcctttctgttccaggagcattcttgcccagagaaacaaaagttgcaaatgttatttttttttcagaaaattttcagaaagccattaaatgtcatgcaattgatcaatgtgcagacagagaagatcaaagaaatgtttcctccctagggtcctaaaactacttattctctcacattgaaattcccatcttactttatgcatctgcggaatatgccaacatgaactatagttagttagttcttacttcacaggcccacttctaaagatgggatccaaaactttcacatctgctgttgttgttcttccaaaccagagatgctactaaaggctccatcgaggtagtgatataccttgccaggtttccctaaagaggtctttttgatggaagactattgtcttgattatagttctactcttacgataaaatgttattgccaagacaacttataaagtaaagggcttagtttaggttttacaatttagaaaactagagggttagagtccatgatgggtaaagtgaacgcagggcagcagaaacaactaaaacctcacgtcttaaagagcaagagagacaggtggatagaagaatggagaaggagggagagacatggttggagagggaggaagtgagagaaaaagtaggggaagagagagaggctgagaatgttgtggcgttttcaaatttccagatacacatcctcctacagggccacacctcctaaaacttcccaaggaatctgtcaactgaggccctagcatttaagcagatgagcctagggtagccattcttattcatattgccacagctgtagagtctaaactcagaagccataagtttaaccacactactctaacatggtgcctatatgttgttgctgaatgtgtagaaggattatttgaggaggttttttttttgggggggggagaagcatgttgagtaagttatactttatagtattgtcctcaaaaagtatttttaaaatgctttaaattactatgaatcatattagtaagctctattagagctataaactatgctatttcttcctgattgtcaatgtcttcttaaagaatatttctaagaataataaaggagaaaaaatggagggctgagaaataaatgttcaaatcattagcaaagaactgaattaaattcaaacaacctgattattcactgatgctcgatgagtaaaatttcaaactcagattctataaactgttttctggtgaagctatatttgaaagaatcccagcatttaaagttgagtttgtgcctcatcagctgtgaatgctataaaagataaatatcacttgttgaattcatgcaagtaaaaagaaataccaagcatttaacatattgggccactaatatttattttaaggttcttaagggcttttcaagtatcttcagtaaatggttttccagctatctccttgaaagagttgtctttctaaagtgttgggcatttgtgtgcccaatctctgtgtctgaaaatttgaaagccccatgactgaattaatcaagaatcaatattgaaactcaagatttagattcctattcatggttggcaagacataaggagaagaatatcaattactattgtgtcttgtggagaaaaataatgcaaatagatgccaccttagagactcaaacattatagatgtagcctgtcaggaccctaatatcccaggggactctctgctaaaaagaagttatattcagtagactgttggcagagtaagtggcaatctttgaatttcagttttagtctgcctttgaggaataaaaagactttttcctcgtatacaagatgggataacctacaattgcatctgaaggcagagcatttctgtagacaagaatggttcaaatggaaattaaggacaaaaggtagcctgatgatttggggtttgatcctgctgggcagttagacaaaatagattgtgaaatggttttgcctacaacaaaggcctacctgaacaccagcgcattaatcacagacagttttaattactgtgatattgattagtacagcaactatgcagagcctaagccagacactgtgctttactgagctagctttttcttttctctctccctctctatcctcagttcatgaacagctggcttaaccagagtctattttaagaacctaaaaggagcaaagacgaagaaagtaaagttgaagattgtgcagggctacattgaggagatttggaagaactgaattcttcaaagaatattctagaaagttttgtacctctgggtattgactctgtcagttcctctcagcaagttcatgattatgactactcagttttcttccctgggtagaatatgtgtagttatttctcaagatgtatattttggcataattcaagaactgtgtttggacatcatgtctgtttggagctgttgggtattcctctttttggaacccactgtcttatcataactacagtttgtgataatgatatataaattccttgatgaacagtcaaacgtgtgaaaaaaaaaaacatatcatgcttacatatttggccccagtgagacatagatgaacagggaattggagttttattatttttactataactaatctaaataaaggtagttttaagcccttacctactgaatcataatgaagtataaattaaaagattttaacttcaaaattctcacttaacatgttttaatttatttttatgtgtatatatgtatatgtgtatgaatgcatatctctatgggggtatgtacacacatccacaggtgtccgcaggagccagaaaagggtcatatctgctaaaacaagagtaacaagtaattgtcagcttcctcacattggtgctgtacaccagaatcttgtcctctttgagcacagcaagcattcttaactgctgtgctatctctccagcccatgcttttgtttgttttttgaactttttaattgacttaagatattttataaatattgaaaatttcctattcagttttcctacccatgcttccctctaaatgagctccccaagtgtagagtaagaattgtaacagactcttcagagagtaaggaggtagactagcaaagaaaatttgatcttcttatgtggcattactagttcttctgccatcacagatgctgaagcaggtatatctcattgtttttcagtcactaagttaatgccacccaagacatttcagatcataattgatgaataattctctaaatctttatattcttgatcataaactctctacatagtatacctccacatcctctgccaaagcttaagtctatcagctactcagtatgtctgtggctctatgcaggactatggttattcggatttcctttaattcctcagtgagcacgaactttacaacactggtctagccttttcttccttgaacaaaatatacaggcaccagtctaatcccctttcacagtattgaactggcattaagacaagtggcacttatcatacaggactgcatccccccccttggctctaggatgtaagacagtttattaagattgttgtgaaggaagactggaaaaaacacaggcactggtaagacttccctgatctttgctttcttcattaccttttctctgaggatgctgcactcaagatagcaagcattcagaaagaaaagggcagttttgtctatacagtgagtttcaggtcagccatggcttcataatgagactctgtctcaaacacaagaaaacaataagcctattagactgaactgtaaatgaaagtaaggtgtcaacagcttatataaatacctaccttgtttttgtttgtggcatgtttctgtgaaacaatgctaaaatgtctcattaatcctcttagtaagtcgggcgttggtggcgcatgcctttaatcccagccctcgggaggcagaggcaggcggatctctgtgagttcgagaccagcctggtctacaagagctagttccaggacagcctccaaaaccacagagaaaacctgtctcggaaaaaaaataatcctcttagtaaacttaaaacacgactataaacatttatcttttatgatgaaatgtacatagttcagttgccaacttgacacaaacataatgtcacctatagcaggaaacctcaattgaagaattccccacattagattggtctgtagccatggttgtggggcattttaaaaatgctaattgattatatggggggtagactactgttggcagtgccattcctagacaagtgagtctgacctgtacaagaaagctggctgagcaagcaagagagagtaagccactaagcagtattcctctgtggcctttgctctagtctctgcctccacatggactccattcttccatgatggactatggtctgggaagagtaagaagaaatataattttcatcttccctagttagttttgtgttcataatatttcatcaaaacactaggacattaaattaggccaagatatgcataggcttatgaaggtgcagtaaattactcagatatcatctagctagtgtgtgataaaactcattcacatctaataatgagtgacatgaaaatgatgtatataatttccattatcaagcacaagagagtgaagaaatacctcctgcatgtgtacccactcatgtaaaataaatacccaaggacacagaatcaacaaaaatcaaacatataacatggaacacccatagattattacttacctgcagcacaacaattgtgtttgttagaatttatggtgagtttacctggctagagatcatagagaggatttatgacctagtcacaaatacaagaaaaaggtcttcttagagtttctagataaaaagtgtttgtagatagacacaatcaagcacctgggtcttgagggaaattatttatattaagtcattttgctcttgacatatctattgtgggctttgtttatcctgagaagctataattagtaaagcacataaattggaagtgaccacaggaaatcactgcaagacggatgttttgaattgattttgtgactggctttaagtcaggattactctattaaatgaagaaatagagtccaaaagcacaagggatttggtcattctatcatctgcttatcagagacagggtgttcctgttcaagtgagctactactaaaggatactacattgatgctcaggatccagagactgggattgagctggctgtttcttatggaacagcacagcattggcaaaagagaattatagctcaaaaccttgaataatagaccttccttggattacttcaaacactcaccagcatcaatatatttagtctttcctgcattcttaagatgatcttaagtctttcatagccattgactgagagatcaatacattggacatagaagttacagatgtatagtcaactgaattcttgacccagccatacctcttctgggaaagtcagcatgttgactaagagaggacctgctaggaaagtaataggattatatgaaggagttgctgtaatggatgtttcctaagcttacaaatgatagttatgttctcttgtctaagtggtaactcatgtgcacaatgaagataataattatatcgactatgcatttaatataatgaaaattcaatatatgtagttatatgtttaaattatatacacacagaaagcatagagatccaaaacataatatttatagaattataaaagtacaaaaagatcacacagcttaaagcaccatttattgttctaatgtttacatgaaatttagattcagtggcctactaaatcaaatcaagttgatacattagaaatcccttatagatcaatactggcagcaaacagattccctacttcagttccctacaggatagggaaactattttgcatttaaggtctaggccaaaagtcaaatccaatattatatccccagtgaaccagaacaattaattcccccagaaggattgatggatgttagggtgatgatctctagcctgtctccatttaagtagcagaaggtagattagtgttgagagaagatggatggctcttgtagaaggacagtgaattattttttacttgatccagtgattatatgtagccagggctcttgcttctcctacaatcccttaatgcctgctacttacatcattctgaaaactagtaggcacaattttatttaaattctttaattactactcatatttacatatccatcccccaattccctcactctcccatcctcccatgttccccaacgccccccccaaaccaatcacacaactcttccacagggatagtgaggccctccaccaggtacgttcaaaatctgttatatagtttaggggagggcctaggccctccttgctgtatctgtgcttcaatactatccctccaccatagggaatgggatcccaaagtccaattgtgctctaggggtaaagactggctccactgttagaggtccattgactgtcttggccacctaggtggcacccacatttagagggcttggttctgcctaatgctttctgcagctttatgactagtgtctacatgctctaactaggtcaggtaaactgtttatgtaggtttccgcagaaccatcttgtcttctttgctcatccctcctccctctccacaactggattccaggggtgacattcagtgcttagctgtgggtgcctgtttctgtttcaaacagctactggatggaggctctaggaatggtaaccaaggtagatactaatctcattataggggaagggcatcaatggcattttatccagcactgcttggattcttagttggagtcatccctgtgattcccctaacttttcccctgtgccagacctctctctaaacccgtactgtctttctctatcaaggcatctcctatcctgccctcctctattcatcccctgtctcagtcctcttgttctcctcccccctcccattcttgacttctcccctccatcctctccacccatgccctgtgtatccacattgttcagggtttcttgtcccactccccttattccagggactacacaattttctcttgggatcctacttgttttctgtctcctctggcagtgaggatttgtagactggtaatcatttgctctatgtataaaaatcatatatgagtgagtatataccatgtttattttttgtgattgggttatcacactcaggatggtttcttctagttccatccatttgcctgcgaatttcaagattccaattttttttttctgctgagtaggattccattgtgtaaatgtaccaaattttctctatccattcttcagttgaggggcatctaggttgcttccaggttctggctattgcaaataatgctgctatgaacatagttgaatagatgctcttattatatgaatgtgcattctttgcatttatgcccaagagaggaattgctggatcttgagataggctgattcccattttctgagaaaccactataatgatttccaaagtggatgtccaagtttgcactcctaccagcaatggaggagtgttcctctttctccacatcttcttcagcataaactgtcattggtgttactgattttagccattctgataggagtaagatggtatttcagagtagttttgaactgcatttccctgatggctaaggatgttgaacactttctcaagtatctttcagccattttaaattcctctgttgagaattctctatttagttctgcactccacttttaattgcattgattggtgttttggtgactaacttcttgagttaattgtttattttggtgatcagccctctgtcagatgtggggttggtgaatatcttttcccattctatgggctggcattttgtcttgctgactgtgtcctttgccttacagaagcttctcagtttcatttattaattgccaatgtcaatgtttgtactactggtgttatgttcagaaagcagtctcctgtaccaatttcttcaagggtatcacctaccttctcttccaggaggttcagtgtggttgaatttatgttgaggtctttgatccattttgatttaagttttgtgcatggcatagatatggatctatctgcaatcttctacatgtccgaatccagttatgccaacaccatctgttgaagatgctttctttattccattgtatatctgccatctttgtcaaaaatcaggtgttcataggtacatgggttagtatcagggttttcagttagattccataggtcaacctgtctaaatttgtgccaatatcaagctgtttgcaagactgtggctctataatagagcttgaagtcagggatggtgatgcctcaggaagttcctttattgtaaaggattgttttggctatcctgagttttttgtttttcaatattaagttgagtactgttctttcaagttctgtgaataattgcgttgggattttgaggggaaatgcattgaatctgtagatttcttttggcaagattgccatttttactatgttgatcctacctatccaagatcatgggagatctttccattttctggtatattctttaatttctttctttaaagactcaaagttcttactataaaggtctttctcatttttggttagtgttatcccaagatattttatgttgtttgtggctattgtaaagggtgatgtttctctgacttctttctcattgcatttatcatctgtatatagtaggattactgatttttttagttaattttgtatcctgctattttgctgaaggtatttatcagctgtagaagttccctggtagaatttttcaggtcacttatgtaaactgtcatatcctttgcaaatagtgaaattttgacttcttcctttccaatttgtatccccttgatctccttttgtcgtattattgctctagctataacttcaagtacaatattgaagacatacggacagagtggacagccttgtcttgttcctgattttagaggaatcgccttgagtttctctccatttagttaatttttctccatttattttgatgttggctgttcctttgctgtatattgctttgatcatgtttaagtgttcctgttattcctgatctctccaaaacctttatcatgaaggcatgttgaattttgtcaaaggctttttcagcatctagtgagatggtcatgtggtttttccttttagtttgtttatatggtggatttacattgaaggattttcatatgttgaaccatccctgcaatcctgggataaagccaacttgatcataatggatgatatatctgatgtgtatttggattccatttgccagcattttgttgtatatttttgcattgatgttcatgaggaatattggtctgtaattctcttttttcattgtgactctatgtggcttggataccaaggtaattgtagcctcatagaaagagcttggcaatgtcccttctgtaggtttggtgttttgattattatgtgtcgaggggacttcttttttgtggtccagtctgtttggtgttctgcaagcttcttgtactttcataggcatatccttctgtaggttgggaagttttcttctatgattttgttgaatatgttttctgtactttgagctgaatttcttcaccttttgccatacctattattcttaggtttcacagtgtcccatatttcctggatattttgtgttaggtatttgttggacttgagattttctttggtcaatgactgtatatcctctaatgagtcttcaactgagattctcaactgagaatctctcttccatctcttgtactgtattggttatgcttacatcagaggttctggatcatttatctagtttttctatttccagcatcatctcattctatgttttccttattgtttctcattctgctttcaaatggttaactatttaaattgtttcctttacttgtttgtttgttttttcttggctttctttagattctttaagagatttgtttatttcttgaatttttttgttttgtcttttgctccatttcatttaattttttgcttgttttttttcttctatttctttaagggattttcttgtttcctctttaatggtctctatcatcttcataagataatttttatgctccatctcttcttcatcctctgcatttgggcttttcagatcttgctggtatggagtccctagattctggtgatgtcatattagtctttctgttattcagtttgttcctaatctgttgtcttccattccattcttctagtgggtgcagctggggtctctccctcttttaggtggcaaacagagggcagagggcagagggcagagggcagagggcagagtggggacaagggtgatgtgcatcaggactcagggtgggacttcaggtgtggtcagatccactcttgtcaagggggagggtaaggaaaaatcaagcagggggttatggggaaggttgggggcagagcagcacccagactcccttcaggcagcaggtcgcactttttaatgggcatgttgcttattttttcacttatccatcttaataagtggctgtagcttatctttatgtcagaaatgaacaaaaacaatgattcccttacaatcttcctaagtgaccttcaaatgtattcatctgtcactgtactacactccattacattgacaatattatagtgtctaaattgggtgactaacattattgaaagttactgtcatgtatgtatacacacacacacaaacacacacacacacacacacacacacatagggtgcaacctgcatagtagacaacagtctgcaaacattaaaaacattgatattacctccaatgtgaatagtcccattaattacccttgacacaattatttctgcctgttctccagtattaaagtttgagtctggggcattcctacaggtttaagtacctgaacacttgccaggtggtggaaatatttggggagattatcgaaactttgagcctactttgcaggttgcatctacttgtaatctcatctggattattagcaagctcctgctactccaaaacagaccacactagctaccatgcttgtcttgccattacatgggtagaacccccttaaagtgagcccaaataaacccatcctatctcaaataaattgtgtcaagagttctgtcacacttttgctgaaatcaactagcacagcaggcctctgtggctttctgagatatactgaagaagatttgctgcccatagtagaagccctttgtaaactggaaaccaggtctaggaacatctctttgtttaattcttctcattcttccagaatctttgtgaaatttcctaaatctcctttaaagaaggaatgaaaggactcaggttgcgcaaaggagaaagagaagagaggtgcaggaggggtaaatgttagcaagatacatgaaatacttgaaagaacatgtcttgtgaagcctaccaccaggtaaaaaaatacacaacaacaagtcaaaatgaaaactcacctgcatttttatatataattttttaaatagcaatcaaacactggtgacattatagttctgaatgctagctgctcaaaatgtaattccctgggtcccaaatcaaagcatccacaggcttcactctcctcagaaagcactagaggaatgttcacctgcttgatccttggtgtctcttcttttttcattttttatttgaattagaaacaagattgatttacatgacaatcccagttcccttcttcctcccgtccttccctacaaccccccaaataaaaccctacctatcacataccctttcttctactcttcacctgactcaacatttctgctccctcatgacctctgcatccttccacttcttatccttaagaccagcagtagacagtatagactttaacacactgtcatagaaacagttataaacataactccatctcaaactttattcacccttgtcatgcaacagaagacatctatcacctcctaggactagacacaggcacattcaaaggacaatatttgatgtaccatctattacttccccttgacctcatttttccttgcaaaggaattctgtttagtatccttggttgttctctaaatctttacagtagcaactattttctactggattcagaagataaaaatgaacatgtatggctcacttccctctacattttcccttaggtttcttatgtgcagattatggattgtaaacttccctaatgatacctgtgaatgtagggaactgagatagaggatgcctttaggcctgtagaagcgagaaaaagtcatcaagtcccttggatccagagttacagcaggttataagttgtctaacatggctgtcatgggtgttaggaactgaatttggatcctctgcaagatcagtaaatcctcttaaacacttagcaatttctctagctctcatttaattttatgaattcattatttagaaagaaatgtaggtgacttctataggggaaaagggatagtaactataaaagtatccctagtagaaattttttttttcactttgaagttacttatcacctaagcctattttctagatcaatttccttggaggaggctcactcaaatttggaacagaaacaaattctggcatcattacttgggttttacttttctcttggcatctttgtgatctgacagtcgtgattcaggctgtttgttctgatttcttaagaaatattgctaatatttctttcccatttctttccacaacaggtcaaaactctgtggagtttactcctagagtagaagaattatctgatgttcttttcctctggctgggcttcctgtgaagattcctttgtaacacattttctcaattaaaagaggagagagagtgggagcttatgggccagctggactacactctacagagctgcttggtttccttggaattcccccagagatttcatccagtggttctcttcttccttcgtgttttcaacattcagcattcttcatctaatccatagaaatgttatgatacatgtcattagatagtccaggtggcttcttggcttctccaacgctgttcttttggtcatttctttgggtttctcaaccaacatctgtccacaccaccttagatcttactataggaagccatgacatttttcagcatcttcctttgcctttgctcctatggtctctgaggtacatcttttaagaaatctatattgtgtgtgaatttgacatcaatactgtaacatggctagacctctgggagtttctgtccttaatctgtgctttcagttttacaacttcctgtcatcctcaaaataatatcatgatcattgttacccagaagtttcccagatatgttatcaaaagaccttacttctcctgggccctttgctcctgatggacatgtctctgctttacattctctgtcagaattgaagatggtatgtgttggcttggtttttggctggctctctgcaatctccagagctttgtgaaccagcttttctgacatgccttttggttgccgaatagtcatgactgtcttcaacacacttgccttgaacatttatacctaatggattttacaaagtaaaatatctgaaatgctttccttggcttctttctagaaaagagatgtgcagttgcgtaaatcatgcctttcgtcctctgaagcatcatctatcctctgggtgttatggtaactaccatcgtcaaagcctacattgcatagagccttaagactttcctgtattttaaaggcaaaagagaggaagtgaggtatctactttcctcttctgaaatgtgtttagacatcactgtatgaccatgactctgggaaatgaattgtcaaatatacaagaaaatcttgcataaccatgttcattgatataccagtcaaaagagtcataatctggaattatcttggggtcaacagcagcaaagtagatgaaccaaaatgcttcacatgtacaacagaactttctgtatctataaagaaaaatatagttgtgaccttggcaggaaaacaaatgaagtaggtggtcaataaatgaaataacactccagaaacacaaacactgaatgttttattttgtgtagaaaatccggatttacatttagatacatgttttgtaaataagtacaacatgaaatcacaaagaaaactatgagaaggggagatagacataaaggtaggggagaggtaaacaagaggagaaaaagaaatatgtaaaacctggatacagaaaggaagacactttaggggatggaagggaacaaaaaatggaggaaaggaggagaaaggggaaggaaattggggtatagaaacaagtaagaacaaaacataaaaaggtatatacacatgaaatgcatagcaaaccctagcattttttatgctaaatttaaaacccaattataataaaagaaagacaggaaatgagatgctgcatatttcctgagactgatgttgctttctactcctctccatgtttgctgctgaacaaaggaagctgctgagtcagtaaaacaaggcagttcactttccatgaaaatgctactggcatcctgaaactctaaagaagtctgttgttactgagagtatcaaagacaacactgtccttcagtgacttctctcattcagggaaatcctacaccctgttaaaagcacagaatcttgagtgcaggctgctttccatttccttctgttcatcacaaagactctctcttctcctaagtggaaatttacaatgctcctggatgaacaggtgataataaatacatgtgaagtcatgtggagccttgggtatttgcagattctgtcactataccctggttgagggaggcttctcacagaatactctcagtatcttcctttttaaaaaaaaactgtcaggtcacactcatagctggctgattcaggtgagctactgggagagtcacatagggattgttgttcattataagtatatacttattcagactttccctcttgctccctctgaagtttttagatttatgatttatatacttcatcccatgactgatgataacattgtgagcttttttgtgctttaatgacgagatttctttgttttcaaaatcagctaaggcctgtctctaattcttgatgtttttcaggcatcaaccatccatgcatagttatctgaacagtatctgatctcacatattctccatgcagtgatttcatctgcatctccaatcactgctctcaatcatgtgtatagcatcatcaccattagcatggcaagagatggtacttttgatacttatacatgcttaaaggtgacatttatgacatatcccttaaaatcaggccctatcacttcaaagagatccatctcagaatccagaggacactaatcctttattattatattcctttatatcattgctctagattctgctttagaactgacaatgtcattagacatgccatttatttccctaactgacaatgtcattagacatgccatttctttcttgtttatatttgtgtcaataccaagctgtttgctcaaaaactggttttaagctcgttcctatgatgatcatgcaaaagggtatatttataaggagaaaaggaattgaaaactgtttcttgaatatctgtcagtgaggtaagtgaagactcattatatgagtagactctggactcaacagaaagcagcagaatcctaattctttctgtataaagtttcttgagaatcatggaaagagacaaagaggatgaagaggtatttgtgaaacccttccccaccttcctttggtggtattagtaatttgatgagtcatggtttatattatctatgtttaagatggttattcgtggaacatcaggttggactttcccataattcctcataaccaaaattctacagctgggtcttctgttccagaaggtgcagcttcttgtagaatgccaccagtccatctttttgaaaaatgtatgtggcttgtagaatatggtctacaaaaccatgtaattttctagctaaccttatctagttcctttatcccaatgttgctttgttcaacaacatatgcatttggggggttcgagtctgttcctgtgaggttcacaatgcagagctttcctgggtcttcacttggctggctattggcaacagtctccacactggcgactggtccatgttgcacctttgtgcgggaacctagaaatatcctggtaacatgcgaaaagatgcttcttttctttgttataaacctgtgcacacactttctctcctttccaccatcaatcccctatcccatcccctttctgctccccagggagggtgggccttccatgggggatcataaaagtgtgtctgatcatttggaaaagaaactcccccatgtgtccaggctgagagagaatccttctatatggaatgggatcccaaagtccatgcacataatagggataaatactgatccactaccagaggcctcatagattacccaggcctcctaactgacacccacattcagggggtctgtattggcccagtgctgatttcccaggcatcagtctggggtccatgagctcccccttgttctgtgagtttctccagcctggtcttgactctttgctcaatactcctccctatctattactggattccacgagttcagctaagtttttagttgtgggtgtttgcttctgcttccatcagctactggatgaaggctctatgatagcatataaggtagtcatcaatcccattatcaggaagggcatttaaggtagcctctcttctattgctgagattgtttgttggagtcatccttgtagatctctgaacatttccctagggccagatttctctttaaacctataatagctccctctattatggtatcacttttattgctttcatctactcttctcacaagtgaatctttctgctccctcatgtcctcttctcccctcctattctccccttctctttttcctaattccctcttccatcccccatgctctcaattagctcagcagaccttttccctttccccttcttctggaggaccatgtatgtctctcttagggtcctccttgtttccttgcttctctggctgtgtggatagtaggctagtattccattgccctatgtctaaattccatatatgagtgaggacataccatgtttttctttttgtgattgggttacctcactcagaatggtttcttttagttccacccatttgcctgcgaatttcaagattccattgttttttttccctcactgagtagtactcaattgtgtaaatgtatcaaaatttctttatcagttcttcacttgtggggcatctaggttgcttccagcttctggctattacaaatagtgctgctatgaacatggttgaacagatgaccttgttgtatgaatgtgcttcttttgggtatatgcctaagagtagaattgctgaatcttgtggtagactgatccccattttccacagaaaatgccatactgatttccaaagtggctgtactagtttgcaatcccaccagcagtggaggagtgtctttctctacatcctctactgcataaactgtcattggtgttttttattttggccattctgacaggaataagatggtatcttagagcttttctttatttgcatttccctgatgactaaggatttgagcactttaagtgtctctattgagaattatctatttagttctgtaccccacttttaattcaattatttggtgttttggtgacaagcttcttgagttctttgtatatttttgaaatcagccctctgtcagatgtggggatggcaatatcttttcccattctgttggctgcctttgctgatcttgttgcctgtgtccttttccttacagaagcttctcagattcaggacgtcccatttattaattgttgatctcagtgactgtgcaacctgtgtaatgttcacaaagcagtctaatgtaccaattttttaaagggtacctcccactttctcttctaagttatgttgagatctttgatccatttgtacttaagtttggtgtatggtgatagatatggatgtatctgcagtcttctatacaccagcttccagttatgccaggacaacttgttgaagacgatgtctattttctattgcataactttagtttctttgtcaaaaaccaagtgtttgtaggtgtgtgagtccatgtcagtgtttcaattctactccattgttctacttgtttatatttgtgtcaataccaagctgtttgcaggaccctacctctgtaatagagcttgaagtcagagatgctgatgcctctggaggttcctttattgtacaggtttgttttgtctatcaggggtcttttgtttttccatataaagttgattactgttctttcatggtctgcaaagaattttgctaggattttgatggggattgcattgaacctgtagatagcttttggaaaaattgccatttttactgtgttgattattcctatccaagagaactggagatcttttcattttctggtatcttctttaatttctttctttaaagactcaaaattcttgatatataggtctttcacttgtttgattagcattcccccaagatagtgtgtgttgtccgtggctagtgtaaagggtaatgactttctgatttctttctaagcccatttaccatctatatggagtagggctactgactctttggagttaatcttgtatcctgtcactttgctgaatgtgtttatcagctgtaggagttcccttgtagcatttttcagggcacttgtgtaaactatcatatcatctgcaaacagtgaaaggttgtcttcttcttttccaatttgtatccccttgatctccttttgttgtcttattgctctaactggaacttcaaatacaatatgtcaagagacatggagagagttgacaaccttctcttgttcctgattttagaggaatcgagttgagttactctcagtttactttgatggtggctgttggtttgatgtatattgcttttattatgtttaggtatgttcctgttatccctgatctctccaaaacctttatcatgaaggggtattgcattttttcaaaggctttttcaggttctagtgagatgatgatgtggtttttctttttcagtttgtttatatgttggatttcattaatggatttttatatgttgaattatccctgtatccttgggatgaagcctacttgatcatggtgggtgatttttctgaacacttagattaaatttgccagtattttattgagtatttttgcttcaaacttcatgagagacattggcctgttgttctctttcttagttttgtcttattggggcttgggtagcaaggagtttgtagcctgataaaaaaaagagtttagcaatgacccttttacttattttgtgtgaaacattttgaggagaattggtactagctgttctttgaatttctggtagaattctgcactgaaaccatctggctctgggcttttttgtttgggagtcttttgacgactgcttcaattttgttaggggttatgtgtctatttaagttgcttatctgttcttgatttaattttggtaagagctatccatccagaaaattgcccatttcctttaattttttgaattttgtggagtacatattttcaaaatatatgttcctcattttatttctgactttgttaattttcatgttctctccctgccttttggttagtttggttaaaggtttctctatcttgttgatttgcccaaagaaccaactgttcattacattgattctgtgtattgttttcctagtttctactttattgatttcaaccaccaatttgattatttcctggtgtcttctcccccagattgagtttgcttttttgttctagagctttcagttgtgctgttaattgtctagtgtgactattctccagtttcttcatgtgattacttagtgctattaactttccacttagccctgctttcaaagtatcccataaatttctgtatgttgtgttttcattctcattgaattctaggaagtgtttaatttctttatttcttccttgacccaggaatggtgcatttgatcattgttcgatatccatgaggtattagggtttctgcaatttatgttgttgctaaatactaactttaaagtatggtgagctgataagattcagggggttattacaatgatttttgtacctgtttaggtttgctatgttcgcaagtatattgtcaattttagagaatgttccattaggtgctgaggagaagtatattcttttgtgtttgggtggaatgttatatagatgtttgttaaaccctttgtttctttgttaagtttctgtctagtggtcctgtctagtggagagggtggggtgttaatgtctcccactataagtgtgtgaaatcttatgtgtgatttgagttttagtaatggttcttttatgagtgtgagtgcctttgtatttgggccatagtcattcagaattaagacttcaccctgatggatttgtcctttgttgaatataaaatgaccttcttcatctctttttattaaatttagtttaaaatctaatttgttaggtattaggattgttataccagcttctttcttgggtccacttgattgaaaaatcttttctcaacccttaactctgaggtactgtatgtctttgaagttgaagtgtgtttgtcatattcagcagaaggatggattctgtcttggtatccaatctgttagcctgtgtcttttcataggctagttaagaccattaatattattgcttatgtttttgtgagtgtagttaacttccttgggttggagttttccttccagaagtttctgtagggctggaatagtgaataagtactatttaaatcttgttttgtcgtgcaatatcttgttttctccatctatagtgattgaaggctttgctggatacagtagtctgaactagcatccattgtcattgtctcttagtgttggtagaatatctatccaggactgtctggctttgtgagtttccatggagaagtcaggtgtaattctgataggctttcctatatgttacttgacttttttccttagctgctcttaatattcattctttattctgtacatttgtggttctgattatcatgttgcaaagggaattttgtggtcagctctattttgtattctgtaagcttcttgtactttaattttcatggctttctttaggttgggaaagttttcttctatgattttgttgaatatgttttctgcacctttgaggtgggtttcttcaccttcttatatacctattattcttaggtttggtctttttatggtgtctcacatttcctggatattttgtgttggggatttgttggacttgagattttcttttgtcgatgaatctatttctcccagtgtatcttcaatgccagagattctctcttccatctcttgtattctgttgcttgcatctatagttcctgattatttacccagcttttctatttccagcatttcctcagactgtgatttttttattgtctctatttctgctttcaaacattgcactattgtaattgttccttacaatttttgtttgtctttttccccatttcttgaatttttgtttttccattcctttgtgggatttttctaatatcctctttgagggtctctatcatcttcataagctatcttttggctcattctcttctgctacatctgtgttgggatattcaagttttgctactgtggagttcctacactctgttggcatcatattgatctttctgttgttgactgtgttcatatactgtcgtcttcccatcccttcttccagtgggtactggtggagtctctctctctcatggtggatatagtacccaagttcacttttggtgggtgcaagcaggtccaatattccaatggctgtcttcctcctatggatggagtcaggactagcaccaagatgctggcagactctggatgtgctggagcatgtggtcagtttcagggtgcagtccccaggcctcaggaagctatgacaaattaatatatttaatctattaacacacatgctagagactaacatggtatttcacttcttgaaagtaaccaaacagatcttaaatatcctctaaaaatatttttttgtttttttgaaacagggtttctctgtgtagctttggagcctatcttggcactctctctggagaccaggctggcctcaaactcacagagatctgcctgcctctgcctcctgagtgctgggattaaaggcatgtgcctccaacgccaggccctctgctaaaattaatgttacccaaacatcatttaataaacaagagtctttggcacaaaaatatagcaacacaatattgaggagaaaatacagaaggagtagttgagcaagcatgacaagagatagtgattataatagtagagaatttttgttgatggcattaagtgttaaaagtcatctgcaagcatgtcccttacttcatgtaattttttgctcttcagaaagagaactcagcacatactcctttgttttacaaagtacttgatgaattttataaactaaagcccacagatacaatctacaatttcagtttaagcactgatatctgcaggcaaaagtatatgaaaattatctctattagttttttagttgtgtataagatttgctagtgtcaagcagcacgcaattacgaactgaaatttcttatcattagaaatctgtttaagggttagtaaacatgcaacatgggtgtatatgagtggctcatgctcaccagaaatttgggatctctcttgagctctttccgataattggaactgtttctttcctcataactggagacacagatatcatttttttttcctggaaggttgttagtcagtcactcccagttccctgggagcaaattttgctgatcatatcaaactaagtcacttctataatagtggcaaggtctagggaacatcacagaagaagcagaggcaatggtaagatccagggaacatcgagtactatgaggctctgtcttttggaatgaagggttgttacattcacaaacacaaagcagctgggattaccgggaaaagacctgaacacacacacacacacaaaaaaaaaaaaaaaaaaaaaaaaaaaaaaaaaacataggaaagtagaagacagagtgacgaggaagaagaaacaggtcaacgggaggatatttggtgcagataaaagagtaatgggagcaaatacaatcaaaatacattgtatacctatgtgaaattgccaagacaaaagaaatatacatatagataaatacagaaattttaaaaagtacaaaacaccatgctaatgccactccattcttctgagatagtttcctgcatcatgtgtacattgtattctagggttttctagagtcatagaaaaatcagaatactagaaacattgtgaatggaggacatcagtcctcccttggtctgaagaaggtttcaccaatcctacttaataacttcatgtcattggaatactaacgttttctcccaatgtaggctggcactcaccactaactataaagagctgaatggagactcttagacccacttctgctgtctcttcctaagaacatcattactaatccaaggagccactaatggggtttaaagttacaatgttacaatgactgttacagagtaatacagtctttaagatgcacttctggggcttctaatcctctcagtaacacagtaaatataatgaacataaaaatgatctttgcagctgttgtgtttgtcagtaaaaataataaacccctcattctacagaagtcctggcagcatctggcacttaggattcacctaatttaatcatattgagtttcagcatttaccatcttacaagctttgtttactgactttcagggtttttatgaaattatactatatacaaatgtagatagcatggacctggtgtcctcactctacgggctccctgctctaaacatgaataaaagctacaatcagtacacccttaaaattttcaaggaaattttgatttctaccacaatgtatgtaacaaaattaatatacattctcagtctttttctacatatactatctttgttataccacagactgagagttgctcaaaaaagtcacccatgatattttcagcttctttttatccaaaatatttaaacacaaacacacacacacacacacacacacacacacacacacaaacacacacacgccacaacatatatcttgaatcaggatttcagaatacttgattctaattgatcacaatccccagattttgattccaaaaggaaagtaagacatgatttatgtagctgatagtccactgaattttttccagaaataatgaaaatttatttattctgtctgggttcctcatttgtatattgactagggcacaaattgctacttcttacaacatcggaaatggtaaggtaggacaggcttttacatcctgagtttgaataatatctaggcatcattacttaatatcaaattctatttagatacataacatctaagaaatattcaaatgttaaaaagtaaatgcatatttaaatttttattaactttacaagcttttgttctattaaaaatgtcatttgatcaaaggagtttgttttctgagattgcacaggctaacatgaaaggatggaatgaaagtagtggatcatacagatcacaaagctttgaagaaggattgggtaaagagggtggtggcctctctttattctcactctctccaaagtatattggctgagaattgttgagcacagacaaagtttctattgtagacattgttttatagtaatgtccttcggcatagaaccttccatcttgaaaggaaggctatttgaacaacaggatgttaaagggcaaatgaaacaacagatattataagcagagatgaaatattccattccacgggaaagcttttttaagttcagcaagttaacaactcaatagcttcaggaagttcctgaaactgactatatgcattcactaggatcacctacctccagtatatataagcagtaagtatttgtaagagatgttctcaaataatttgagatacctgggagaggtagagacagctgaactatcaggaataggtttgaaccaagtgatcaacctacaaagaacactcttcagcttattgatctgtgtgcaggttgtactttcacttcatgtttcctgctttcatgaacttccagggtaggagttattgacacatctggctttgacttatttctgttcctctaagtaatctcttacacatactattgcaagtaaccccataaacctcattgattcgccgtgttgtactttggcatatctattcattggaatgtacaaaactccctttctggttgagtggacaggtgttttgcatttccataggaaaggtttgtcataaaacactcttattaacacacaaatcacagattttatactctttatggcaagactggagaacacatacccagcaaacagcagctttaatatttgatagagatatatgcaatggccacccaccatatgtggctactccctacagaagccagtaagtcccatgagaaagccactaactcaatttaatgcagggacaaatataactttaataaaccactttttgcctacagctacaaatccaagaataatgatcatcttattatcataaattttacagaactgcaaagtcaaaattatttgtttcattgtagcatgagtgcattcaaaagtcaggaggcatacaacagagtgaaacaggaatggagaaggcacaacaatgtatgtctggcctgccaggcatttctcagatactttactgcccaacagaagcaatttcctccctcatttaagatttgttatgcttcatcatcttagaatgagggaatgaagagagccctgaagctggctattaaatgacagaagctcaaagagcaatgcagtaatagtgtcccctcctccataaggtacatagaatgttctatactccaggctttgaagagttagacactactacctatgaaaaattacagaaggaaaatgtggtctttaattgctttgtcatgatgtctatcattagattcaaataattatatcaataggaagtggtagatttcttaaatatgtcctcagcctcactaagtcaagactatgaatgaagtaggacctggaaatagaatgggatatctaggggcttatactccttatggggatactggccctggccacttttgtacaaataaatttgaagttcggctggtgtgataactgttactaatgtgcttaccatgcaagtctgagaacatgtgttcaacttcaagaaacatatgaaagagccacgtgtggtgacaaacaattgtaataccagtgactggaaggacttagacaattccttgggtttgctggccagatagcctagcatagtcagtaaactctagaccaatggagagccagactcacaaaaaatgtggacaacatctgaaaaacaacacttgagattgttctctggcctccatatacatgtatgaacatacatacaaacagactgacaagcattcaggtacacataaaaatcatcatagattcaacaggatggtgttaccacatcatgccgctttccataaggtttctgctctcttgtgttgcttttcaaaatttactgtgggctaacctagagacagttgtgtataaaatgatgcttcagcaatgtctgaaataatcttccagaaagtcttaagacatcatgtgaggttacaaagtatcccagacaccataaaattggattgcttagagactacatgcatagagaatggaagaagcctgatgccctgctacaccagagatgtccagagaggatgcccactgcatttccacactgcaaccacagggaaataatgtgccactcactgagcataaacatctaacctagtatagtaagcaatttgcattgtaggtgttttaataactagcaagaataatttgactagaagttgtcaccattatttttgtttgttggttggttgcggttttattttatttatttttattttttttcatttctaactacagttgtggtaagtccaatcttttaaaaagtttcctgtactttctttctgtctgccccagtgccctctgccctcttttcccttctctctctctctctctctctctctctatatatatatatatatatatatatatatgagatatatatatatctcatgcagaaaatcaaacctggacctcaccaggagagtgctatactgagccaaactcctagccttgttaccacatcttcatccatccaccttttgtagaacattttgacttaacataagatcatttatgtacacacagcagactaggataagactggtaagaatgcttatcctttataatattggatttggagatgaaagcagcagtcaaatatgaacttcactataagcatattagtcagggtaaagaaacagataactgaaagaatgaacatatattatgaaagagatttatttctgtggtttatttggcaggggctaaataacctaagaggggtcatctgtttgttggagagacagaactgagaaatgctcatgatacaaggttggatgcagccacagtaacaatcaggtattgactgcctggaggatccctagagagctcttcatctttaatctacttcggaaggctcaacaagctgccttcaatgtcaggaaagaataacataatcaacattaaagcactcaacagccaacagtgaacaagggaagacaaagcaatcagatttggacctcttatatcatggtcaccactacacagaaccacctaatcatgggtgggagttggtgactttgccctctttagttttcccttctataagtgctcctctgacccacccataggttattctcttagttgactggagattccatcaagttgacaatcaagcttaaccatcacacttttcagcttgtgtaggtaagttagagaaaagacatgtgaagacacaggtgcatatgggaggagagaaattacactcatttccccatgtatgtgggactgcccttctttttcctagagatggccctctttggtggggaatttagtgtgtacacagtttggatggtgcagatgtcattctcacacactataagaggctgtgtgtactggtcagtttttatcaacttgacacaatgtaggtcacctgggaagaggggaactcggttgatgaattacctccattagattggcctctggacatgtatctagggcatttgcttgataaatgattattgttggagggtcttctccattataagtaattccagccctatgcaggtagtctgggtatatgaaagaggctacatgagtgggatattgggatgatcaagccagtcagcagcattctggattctctatttaagctcctaccttgacttctctcaatgatgtactgtctctgttatgtaaaatatatattttcttcccctggcttgctttttctgtgttttatcacagtaaccaaaagcaaactatgacactgatctccttgggaagaatacttctatatagatttcttaactacaagattctgttctgatactgccatttgccaaattacaaaaattttctgagaaaacataaaactcagtgggggaaatatgtgccaatagaatatgaagaaaaagaagagtagatatggagatgcatgagatatagagatgagcataagaacagaaatgaggtcagtaagaggattagtcttgatagcattgatacaggaccctagccagtgatatgtagccttacatgaaacagtaactataaatccttctgtagacagatgtttctatcatgcccagtcccacaactgtttagacccaaataaatacacagaggcttatattaattataaattgtttggcctatatggcatagtgttcctattggctagttctttcttaattattaacctaattctgttaatttgtgcatctccatgtcatctaggcttaccagtgatgcccagccctctttcttccttggtagctacattgtgtctctctagcaactcactctctgggtccctcttccaagaattttttgtgtctggtagccctgcctatacttcctacatggctacatgctgcctgtccattgacagaaacagctttattcatcaaccaataagagaaacatatattcacagcatacagaaggacatctccattaaccttcttcctttatattactttatgctgattaatattgatattctgattgtagaaattctgcaacttcagaagacaaccatgacttatggttgccattttcataaaactgactatagctttcctcaagaatcagccacagttacaacacttgagcatgacttagaaattctgtgtgtcacattgtcatctcagaagacatattgtaaatgagtcgtatccttggactgaacctaatgtcacaatgactcctatgaattttctcctacacattctgaaaaatatgatttcctcaaggccatgttttatcatggccctttcaatgagtagagccatgactaccaatatacctgggtcacagagcccagacacaaggtcatgtgaaatttagaaacagtaattcatgagagagaagatgggtacacacacacacacacacacacacacacacacacacacacacacacacacagacagacacacaacgtgacagcattccacaatgctcacgatgttcaatcaggaacttttgtcttaaagttataatagggagcaaagatgtatacacaatatagcaagaaaggctactttgtgaaataaaatggggctctattagttgcttgtatcattattgtgaacaaatcatgacacgaggcaaagagaatttgttttggatcatagtttaagagaaggtgtgaaggaggagtacatggcagttggtcacactgaatccacagtcaggaatcagaaatggatgaatgctggcctatgctggatttctgctttttctctttttgtttagacagggattccagtacacatgatggtgatacctacatctggtctgcctctcgtcttcagttttacttttcaggctactcataagctttcctggaagtgtgtttcccaagtgactataaatttgaccaagttggcaatgaagataaaccacagcagaaaaaaattaggaagaaggattcatttccacaagacatttgctagagatctgtctgtccatcaaaacccgtgtgtgtgtgtgtgtgtgtgtgtgtgtgtgtgtgtgtgtgtgtatggtgtgtgtgtgtgtgtgtgtctgtctgtctgtctttctgtatctgcacatgcacagactgaaaacagacatagtaactatcaaatgaaggagtagaatcataaatgtcttgttaaaagggactttacaaacaaggtaagagatcattgtcagagcctgctcaataaaacactattctttacagagaataagactgagaaacaataaggttggaatcatagcacatttctcttagggtttcacaatagatacagcaacatttaaaacaataagactttctagaacagagaacaaaccatttgttattatgagaccttttccaactcattcagaacctactgaaattttgtcacattcaaacattgataattgtgtaataaatagactggggaccaaatatcttgtttattatatctcatttaattgctagactcattagaaaagcatctggaatgtttgcttcaaattatttttacattttcgtctattctttgcctgaataaaaagacttcccaaataataacatcacttctttagtcctaaatgggatatttattttatgcttctcattatgtcctaggtccaataaaagcttgaacctattttccagctttctgtttgcccactcagaatatggtgcctcttcctctaagcttacacaaaaattaaaaatctttttatattcttgttgataagggtacttttcagccctagatatccttttaggcaatatgaaaatctacctccttatgtcacaaatgagacgaatatgaacatgtgaaggaaaccaaaaataaaataattgagtcataccaaattccactgagaaatgtgctaaataggacctttgtggtagaaaagaaatcatgcatggcgaagggaacatatctggctgtttgcaggcatagaaactttttcactatttcctatcagataaaaaaaaaaaatgaagcgaatgctactagctgctgaaggttaatcaggttggctcactgctgcaccctggagacaatctggcatcttctcttcatattgcactttaaaaccagaaaagctgggaatggcattttctgtgtgtttaaacatcagcaattctccagtgccaagtctggatctcatactctttattccaacggctcttcttgcaataatgaggcaccagggcctccaaggtaattcattcctcaccataaatgtggtgaaatgtatcccacctcaaaattaacgaggaatttcatattgatttatgtgtgaatatccaatgggatttgctatgctggtaccagaggaaagacattactgaagcagggtggcataggaaaaagtcactaagacttggaggccataaccctggaccaatgtcacccactcttacgaactgtacaggtctagcaaaggcatgtttttctggaccaatcttctattcagcaaatgagaacagtaagacctaccttgcatataagattttgatttaaatgatgaactatatttaaaagactttacatagattgtgttttatgttaaatgattttatatgaattaaagcttattcttgatcttttatgacgtaaacagcaaacacagctgaaacttaagtgtaacaaccagacattttattcttttttagacatttcttgacaggctgtcagtagtttaccatactgtactatgaaagggaaataaatacataagcttcccagtccataagcagtagacaaatgcaataagcagctaatcatcagatgatcaaaaacaattcaataaatataacaatagaggtatttttctggcaagaaggaaaaatagaaaaaagtcccagatcttctcttggcagatttagctgcattatcatgtctttactgcactgctattcttgacttatctctgaattaagaaatatgaggaattaaacaaagtgaaatcggtcagacatgttagatactgataacacatggaggttaatctctttcagtgccatgacaagatgagcaggctgactcttacacttagaaagactcatctggttgtgagagctgtgagccacctgcaaactctcttgatgcaataccccagagcaatggtgatccctggtctcagctatctgactgcgacacaaggagagagaactcactatcaagcttatttgaaatttactaagcattaaaatccctcattgctagaataaagtgagcagaaggataaacaaagaaagaacaagtcactagggttatgtttcttaaggtcaggaaggaattttctcctcagatgtatctaatccatgttaggtaggatgacgtttcatgtatgtctgcaattattttccttgtaatgatgagttttatttgttttcagttgccaaatagttagtttacactataaattatgtgtctatactaatattagagaataaattagaatcttcataagatagaaattaatacataatctttcaaaagtactgtgggttactcggggtgagaaagaagtggacaaggggatagggaacacaatgaaaaaaggagagcggaaaagcccttgggaaaaatggtgaaataatgaggtcaagaaatagtatgattggtatataaaaagagaatacatatgcatctcaaaacccaaatctaatgtagaaatacttgaagattcaatttgtgttcctttggggaaagaatggctcatttgttacttaggttttgttccttaataacagtgcttaaaatatcatttattttcatagtcataagaacttcactaagtggcttctacaaacctccaattattatactaaaggtggctacataatttctactctctggttttatttgttattatggatatgcatgtatttatcagagactaaaggaatatttataaagtttaaatctatatcctccaatatccattttgttagaacaatttttaaaattttaaaacacaatatgttatattttattgaaatatttattaaatattatgtaaaatcactttctgaagtggaaaaacattaagtatattagtctacatagtatctttttgaagataaatctgtgatattatttttcacctatcttgaattgagtcataaattaagaaactcttttcccctaatttttactgtgaatgaatttttatgaaattaaaagaactgcaaaaatataatatgtacatctaccaaaaaactgagtatttcaatcaaattttgtttctacatttaccacacaagactaacttccaatgaaagtttatttaataagttaagatcaccaaaaggccactaaatatttctaacagcattttgcattatatctgggaacatttaaattccctgatagcctatgttatcagtttattatctataacacacagtgaaatacaagttaaaacttcataagtaagacacttattattttattaaatattttactcacaaaacataaatatataacttgttttatttttgttgggctttgcttttggtttatagagtagagggttaagggatttctatactagctcatgtagcccagactgatcaccttctgtagccaaggatatccttaaatttctaatactcctgtttctatatttagagtgctgagattacagatgtgtgccataccaatccttaattttaattcaaaatctgtcatgaaatcaagtagacttttgactatatcacatggctacctaaacggaggcttttctgcccttcctagttctgcaaccacttctaaaataatcactcagaggcttaatattaattacaaactgtttggtctgttgctcaggcttattactagctagctcttacaatttaattcaatccatttttattaatctatacatttgccaggtggcccatggcttaccagttctctgacatcttgtcccgtgggtggttagattgtttttgctccgactccacccttcttctgtagctctgtttggatttctatcctggctctatcctgtcttgtcataggccaaatcacatatttattaaccaatgagaataaaacatattcacaacatacagaggggttatcccacagcatggcccctttgcaccatcttaatatttataaaattcataaagagggaattataatgttttattcaattattatctgacttttagctcattttggaattgataatacagatagtctgagccatcacaagacatcaggtgagggattcatgacctgatgatcatataaaatgactctagcacaccacttagtcttttccattttcacctcttttcattcaactaatctttagatttaaattaatggaaacatttcagagttgagctgtcatttttcatttctcacccaacttgagtttaatacatttgtatttgtttgaacttgacattctttgaaagaactgtcaagtgagtgccataggaaagggttttcattgaaatttgtgtaaagttcttatgagccaagtggaaaatgtttctatgggtttgatacaggcatctgtgcaagcccagtgcagtaataatttaaataatctgcattcatccaaagttcaaattcttagacaagtacataaaaaatgctctaagccttgaactgcaagaaaagagcccttcacttgtgtgtctttatgatctgtgacattgtatctgagtacaccacagggaagggttaaaagtcaaaggagaaaaaatgcattactataactgtaattgaacaatgtcactctccttggttcatttattcttaaatagagtccctgaaaatccagaaaagtaaactgttacatgagatttttttaatcaggaaggttgagttggggaaaggacagagagggagatgaaggaaagaaataaccttgttagaagtagccattatggggttaatgagaaactgggcactagggaaatttccagtaaaccacaaggatgacctcaacaaagaacctaagcaatagtagagcggctaacttaaatgtccttcccctataatcagattgatgactatcttatatgccatcctagagccttcatccagtaaaggatggaagcagatgcagtgcttcacagctaagccctgagccaaactcctggagtccagttgtagagaggaaggatcaataatgtgagcaaagaggtcaagaccatgctggaacatgcaggaacagctgacctgaacaaatgggagctcactaactagacttaactaggccccctgaatgtgggtgacagttgggagacttgagcagtttatggggccactggaagtgggaccagtatttattcctagtgtatgggctctttggagccaattctctatggtgggataccttgctcagcctagatacaggggcaaggacttggtcctgtcccaaataatgtgacagacagagaatcaattgataattcaccatgggagacctcaccctctctgaggagtagatacggggtgggatggagagatggtagcggagtaggagaacaggagggagagggaactgggattggtatgtaaaatattagttttaaaaataaaaaatgttgcagggcattggtggcacacaccattaatcccagcactggaggcagaggcagaggcagaggcagaggcagaggcagaggcagaggcggcaggcagatctctgtgagtttgaggtgagtgtgttctccagagcaagtgccaggataggctccaacgctacacagagaaaccctgtctcaaaaacaaacaaacaaacaaacaaacaaataaataaataaataaataaaatttaaaaatgccttttatgcttaacattgatcactcatagaatatgttacctggcacttttgttcccagtatttttccttgaaaatattgtagaaaaaaaagagtgattcttccaatcatcttttcctttttcttttaaaagtgaaattattttcactttctaacatttataaggccccattttgcaaatttcactatgagctacctctagttattcaaaatacatatgcaattgattacatcagaagcaatttagtctaatcagtgcttaatgggttaactccacttctagcatgttcagcatcaccatgcttctaaaaaactataacaaagcttgtactgtgaccatgtggagccatgtacacaacatggccaatgtctaatgccatttgactccaatatggacagaggactgtatagatagaagaaatctgtcaattatcatattctttcaaatcttattttctattatttatgccctagattacctgcgtttaaatcttgagtttaaatagtcttgaaattaaatatctcctaaaacaaggaaatagaacaaacctcaaaacagaatggaaagcagccatttctggatttatgtgaaagcatacgggaagtggatgggaaatagctaggaccagtgccaaacaagataaaatatttacttgctggtgttgtgggacagcgggaaagatttgaagtgctcccagaaatcaccttttcctgcagccttacagggccttgtgcatacagtttctattttatataaaataaaatttgcatgaattttgtaagaaattctaatgtagggccagaaattataaagtaatagagtaaaaatacctggaactgaaccatgctataaggaagactgtgaaaattcaggaacacacacacacacacacacacacacacacacacacacacacacacacacacacacaaatcacttactgcatatggagtatttgtaaaagctgatgacattactattaattcatcgtgatagaaacaaaatgtaaacattatgtgagaaaccaaaatattgacagaagcaggcagatgttgtaacctcttgagatatatactaaacagacttgtaacacatcattctacagaagcagagaccttaagatgttattgtgttttatcatggcatgcccggtcttctctacatgctaactgaagatttagtcataggaagagcaactatggtgacagatgaagtgtttcctttctgcttcgcaaactactaaacgggtgatttttacttttactcatctgaatattttaacatttagagctttgcataaaatgtcatttgttatatcactatacttgacaaactgctacatactgaaattattccaccattatcttttaagatttttatctctaatgaagcagtgcatattgccttcaccacagattaacaaagctaccattaacaatagtgctcaattaatagttaaaatttcaatttgtctcatatttgaaatccgagtggttccttcttaaatattaataacattaagtacattgtaatagcttctatggaaacgaaaaaggggtgttagctattgtaagtttatattgtactactaaagaaactcagattttcaaatgaaaccctctgttatgcatttataagaaagatctacaattctaaaagcagaactttgatgaatgaagttggaataagaaataaagtttttaaaaatcttttttcacttctctaatttagaacacagacaagattcatactcattctaaaccttataagtgattacttcttcatatttaccaaaggaatataaccctacactcagatacatggccaattgacccaacaaaatggagtgaagcagatgtaatattttctggttcatattcttacagaattttcatgacaaaatgcagccatgtcctctccaaaagctggaaggaactacactgcagatatagtcacaagtgtgtgtgtgtaagcatttgtgtgggcctgtgtgtctgtatgtctctctctctctctctctctctctctctatatatatatatattatgtatgtgttcatgtgtgtgtggtgtgtctgtgtttgtatgtgtttgtgtgagtgtgtgtctgtgtgtatatgaatatgtatgtgagtctctgtgtgtgtgtgtgtgtgtatgtgtgtatgccacaggtgttcagtgtctgtggaggacagaaaaaagaaaggagtttcctggagcttgagttttaagtgattgtgtgctgcccaggtaggtactggaaagcaaactctgtagctcctgaaaagtaacaagtgctctgaacaactgagccatctctccagcaccaagatgagccttcttcataagcataattgttataattatttgtgtcataaaataataattttaagctcattgtcattacaaacagattacaccaccttctctaatcaagatagaatggaagtctaagtgaggatttttgatagtgtagcttttttgatagtgtagctacctaaaagttgtgaagcctcaagaaaagttgaaaatgtgattgcgagccaatcaaacaattaagagtgcttgctgttatttcaaaaaccagaatttggtgtctagcagcaatgtctaatggctttcagcaccctacaatgccagccccaggaatctgacatctgattccatcctcagtgaatacctgcctaggcatgcacatattcacattcatagaaaaataaataaatcaaaataagtcttttgaaaagaatttaataacaaagatataatttcttatctgctttcctatcaagactttcttttataaaggtcattttttaaagactgtgaacacagtagtcattaggctccgagagttggtgcaagactctcatcctgctgctactttctgatatggctttgttgccaagcaccgagtttcaggttttgatagaatgtgtcagaaagacatgatctgtcagcatgtctcattcctccccactgattaatgtcgaagataaaatgaatgtttaaagccataggattctgaaagcccaaaagtgagcaagcctccaaaagggcaaagcagccttcaactgtgtttgaaattttctccccctctgcttgccttccatgttgtgagatgtgcctctttttcactaaactttcataattcacctctatttcaatagctctttttttgttttgttttgttttcatttgcaggattttttcctctccaacatctgctttttatttgctctttatctccaaataatagctttcttcaaacggcatgtgtggttgccagtagcaggagcctattctagaggtaatgtgtcataaatggccatgtagaacacaaaatgtctgtgcacatcctatgtgctgactgctaaacctgagcctacccctttgaaactgactgcaaaatatatccaaacatcatttttccattgaatatttagtggagatgtcccgtatctattgtgtttaattttagaatcttaggttaacatggaggtgaacaacctcaaaaagacctgctgtgtgggagtccctggtgatctgaaagaggcaagaagaaaatgctgttcaacacgacttagttaactagactagttcacaattctagagtctgacacttagaggtttatttttgacatttttaaaaattatatatttaatttcattcaacatatttaagcacagtacactttgacaaagtttcctcttgacaattctcatcacaaaacttatggtgtggccacacagaaactttcagatcctattcttattaataatctcttttttaagttttttttaagttgcaaaagacaaaatgcatgacttttgcaaagtacctgtgaccttttccacaaaaatggcttctatttactgagacacaatgttcactataaagagctaggaaggaagggtctggaataagcgtaatagtagaatcttgcaaaattcatggacatctttcataagaatggattctattgactggggaacaatgctcaagagtctgagagatttgggtgaagcctggctctacagatatcaaaagatcacagggttaaagtttgttataccatggtttaaatatgaaatacccctcacaggcttacatgttgaatacttggtccatctggtgaaatcatcttgggagatacaaatctttaggaggtaagaagtaactaaatgaagtgggtcactaggaaaagagcctttggatttacagtccagtcctacttctgattcaattgctttcttcttaccagtgcactgaaatgcaaaatgtcatatggcaggcttttctcactatcccaccccaccaggatgtactgtatcacctcaaactgtaacccaagataatccttgcttttctgagcggtttcttgctgggtatttgtttggctatgaaaagtgtaactaatacattgtgcctttggttctattcaggcagagtaaaagcaatggatgagaagatacttggcatttacatatcatattactttcagttccaagacaaaggagcttaccaccatacaaaaccacatggaagagtatgggactcagtcagatgttgtaagtgagcctaggtaaagcataaggctagtatgaagatttttcatggacaagtatagcacagatcatctggtaggcacagtaactaaggagtagagagtttgaataatttaatttcagcaaataatttgcctctggactttataagcaacataacagctcctgggtgtctagttcctaaccagcagttgagttgcagtaaagaaattactgggttaagttatgagagtttgataaaggaagtggctagaagtatgatctctagattcagtgatctgcacatcataccaaagctgccttctcatacacacattacttgttctatttaggaattaactgcccttgtgaggctagattttctctagttactcatggttccaaaatcatcaagcattatttaatatagaaaacaaaaagaaaacataatccctgtagaggatccacctcagtgttctagccatctgggcctttcagtaaggaaaggttgctcactgatctttaagacattcttgctgtctcagcatagacacatgggggagggcctaggccctacttcaaatgatgtaacagactttgaagatcccccatggaaggcctcaccctccctggcgagcaaaaagggaatgggatagggggtccgtggtgggtagaggaggaggggagggagagggaactgggattggcatgtaaaataacatgtttctaaattaaattttaaaatgtgaatgacaaataaaagtattctgttatatacttctcagtctcagagtgagaggggctatgtgaacaagttctcctgaatggattagatggtcaccactcaggatttaaagtctaaaatttctcaaacgaaactgcattatgttcttcatggactaagtgctgatggatgtaacaggccatgtgggagatccagaacccagccagcaactgaatggaacataggtgattcagccacattaacttcctctttgctgctgctatcttaacctctttaaatatatttatacagatgtgtttagaaaatgttgggccttttctaatccacagttcattttcatcttagaccctcacaatcatgattatataagatattttgtatacagtgctcacaacacttctaaaatctcaattctcttactgctgtacccttctaataagccagccctttaggcacagctaaccatactcttgatgatcactgtagtggtaaacctattctttattcaatttcttccttaactagcttaattacaccgtaaattattaaaatatttccattgattctctcaattccattgacttcattgactcattttagttgctcaacaatatctcaacctctaataaatctgttagtccctagtccagtcaccaagtatgcttctcttctgaatgtggtagaaaacacatgcaagtgctaatgtcatttcaaattaacagtcctgatctggaaaccatcactctggtgtcattccacaatctggaagaacaactctaaccactctcctaccctctcaaaaaacatttcatcccattcctcttcttgatttctcaaaacctgtccccattgtcattgctagttgacagttttgcttgcgagtttgtttccaaacattcttagttacacatctatttaaccttctgcttgtctggcactctgtgctctgctttccctcataatattatgggtgaaccagattcttccatgaggttaccactgccacttgtgactttcattctatcctctcccctagttaaagtcatatgtaagtgagtgcatacatgtgtgcactcctgcatgcacacacagacacttttccccactctcctacatcattggttctgtcctatgcaatgagtaatttccatcatcatatagctcattataatttctgttcctctacccagcaagtcccacatctggttccagtgcttctctatttaattatgtatttttatggtctcatccattttggcagttgttttttaaagctcgtgctacttagacttttctttgttgcattctttcagtattttaattgttcatggtagtcaaccatttttattctcttcattcaattattaaatatatgtttattaaaatttgttttctttctattttctaaattttgtctattttctaaactttttcattctattttctaaattttgtcactcttgtttttcctacgtaactgactcatggattttttttattctgcttatttttcttactctgttcttaaggataatgcaatttctttcatcatctctttagtgctgttctattgatcagtgtcctcctcaggtgtcccaggcccaccctgccttggactatatgctcttccctaaacctaagtggctcctttccccacactccagtggcttattttttaacccattcttggtctttactcacacactcccattccataaatagtccagatggcattttttaaatcatagtatttagccaggcgatggtggtgcacacctttaatcccagcacttgggaggcataggcaggtggatctctgtgagttcgaggccagcctggtctccagagtgagtgccaggataggctacacagataaactctgtctcaaaaacaaaacaaaaaaatcataggtatttaaattatcacctaacctctccatactgtttatctacatagtttttttaaacctacaaaaagttaggcacagttatttacttcagtgaataattttatttcaagacaccctcttttctacttctcaggcactccacctgaacctagcctctttgaggataaaggcttcactaaatgctgccctctgaagactctccaaagtctagtgttccatctcatggtatcatttaagtatttcctccctctaaaatgaatttgtagtttgtctctaaaataagaggcagggcctttattaagtgagtaagtcaggatggttctaatttcaggaatggattaacatgactattataagaatagcttactgaaaatgggaactcttgcaaagacagtctttcttcatcacatgttttcacctcgtatcttgtctttcattcaccaggagatgcaaggtcttcagcaaatgctagtcacaaattgccatgctctgttcaaacaatctaaccatcataactatgaaaaataagtttcttttctgtaccatttaggtacttttctagagtagcaaaatcaagactgagacacttgacatactgtgtgtgctcaattcacatgtattgaatacatgaatacaaaacaagagaggtaaccaggaaaaaagcacacttcccccctttggatattgagagatcctccctgtatcttccaaatgatttttttttattgtgcaataaatctccaagcattaacatctcattatgaatttaaatcattccatctctgttgctatggcattttatcttaaattcatagtgttacctacaaatgttaaatgtgccatcctaaacaaatacacgagcatagaatatcaacacctcttctgtctgtcccaaaagtctcctctcattttgtacctctctgacaaaaatggcattttgtatggaccaagtgaaaaagaacttgggtggctttgcagtatttaaagccagttctattcacacagtttcaccactgaaggataacactggccaggcttatagctagcgattactcacttggctgctttcgacttctcactaagccacataaaaatgccacctgctactcacttgattgaagacagactgatgtgagcatctagtaaagaaggcaggaaaataacacagcaattgtgattcatgtgttcacattaatttttattctttcttctgccctttcctacctatctcagtcacacctttctctctacagctgatgtttgctctaatatcgagcccattatcttattgtattttttgatttcactctggactatttgttctcaaaatatacctatctattcaattggttttttacagaaatgattattgatatcaaagtcacatcagagattttcaatgaggtacagcatattccctcagcagtctaaagaatagatttataatgccattgtagagtatctttcaaataccctggcccattaagtggcaattgatgcttaactaatgtgctttctcttgaagggcctatcttttcacagcactggatagcaatatgcaggagatggatatgtggtgggtgaaagttcaacctgagatttctatataggagaaaggctgatgcaagttcaaaaggaattttatattctgataaaattacatctgaggcagtagatatggtttaatcacatgtaattcttatcgttctagagtcaacctcttatttcctttgctatgtttaatttaacacaaagaaaaataccattaaaatttatatctaaagacttatgtagtgcacatatcttttcatattacctgaagaatatttttaatacttacaccatttttcaatttttgtctcttacaattcatatttctttcttttttattcttagcttcaattattttgcttttttaaattaaaaatacaatttttcctcacatcatatatcctgattacatttccccttcttctattcctcccagttcctgcccaactccccttccatctggatccactatcttgccatctctttttagaaaatgaacaggcttctgagatataaaaatataatgtaataaaatacaatataatatgacaaaaactaacatatttgaattggacaaaacaaacagaagaaggaaaagaaaccacgagaagtcacaagattcacagacccacttgttctcagagtcaggagtcctataaaaacaataaattagaagccataacacacacacacacacacacacacacacacacacacacacaaatgaaggtaggataccatcatagatcaaagggcttgtggcgtggtcagtgtttgtttctcttttggtagaatgtcaacaaccttactgtacccaaaacactacaacatggggatgaaggctctatgtaagcaccatcttgacttccccatgttcagtgaattgtgttagtgctctattaagcaatgggaccttgctatgagtctgggaagagcagcttatagtcttgtcaacagcctctgttcggggattgccatggaacccctttggtcaacaactcaaaaagatgtagttcagtcctgggactaaaagcttaatttaatgataagaaatggccaatttttgctctgtctctccatttttgtctttataaatttcatgaagatttgtgtgtgtgtgtgtgtgtgtgtgtgtgtgtaatttgacttctgtactaccccttaaatgccttttattttaactgtctttccctgtattccctttcttggtgcctcctaaacttcccttccccatttgatgctcccattccagtggcccacacttccatccataaccatctaattgagttttctttccaaataaaatctatctaacccactaaaccctctgtggttctacatattgtagtttgtttatcattgacgtaataaatatggatatataagagaatacacgtcttatttgtcattctgccctggtttgctttacttgggatggattgtttgtttgtaccagtctttttatttttaggaggctaccaatcagctttccaatgaaaacatagagagttagtagttatgaatgcttggtcttatattgtgcttgtttcttgctagctctttaaacttaaccggtttctgtttatctacattctgccttggggcttcttatcttttctatttgcactccttactttattgctgactctatgtttggctgactttttttttattctttatgtactactcatatttacatatccattcccccattcccttgccctcccatcctcccatgttccccaccaagtcccccaaatccaccccccaactccccaccagggatagtgaggccctccacgggggacctttaaagttggtcatatcatttaagggaggacttaggtcctccttgctgtgtctgtgctgcaatagtatccctccatagggaatgggctcccaaagaccatttgtgctctaggcataaagactcgctccactgttagagttcccatagactgtcttggcctcctagatggcacccacattcagaggaattggtttggtccaatgctgtttccctagctttatgactaggctatcagtaggtcatgtccactgtttctgtgggtgtatccagcctcatcttggctcctttgatgatccctcctccttctccacaactggattccagtagtatagttcaatgcttagctaagggtgcctgtttctgcttggaacagctactggatgaaggctctaggaatggtaaccaaggtaggcatcaatctcattatgggggaagggcatcaatggtatcctctccaccactgtctggcttcttagctggggtcatccctgtgaatctcctaacattttccttatgccagacctctctccgaacctgtactgtctccctctatcaagtcgtctcctttcttgccctcctctattcctcccctgtctcagtcctcttgttgtccttcttgggaaaaggtattcaccaaccccacagctgacagagggctgatcaccaaaatatacgaagaactcaagaagctaaccaccaaaacaccaaacaatgcaattaaaaattggagtgcagaactaaatagagaattctcaacagaggaatccaaaatggctgaaagatacttgagaaagtgctcaacatccttggccataagggaaatgcaactcataaccactctgagatacaatcttactcatgtcagaatggttaaaatcaataacaccaatgacaatctatgctggagaggatgtggagaaagaggaactctcctccattgttggtggaagtgtaaacttgtacaaccactttggaaatcagtatgttggtctctcaggaaaatgggaatcagtcaatctcaatatccagcaaatcctctcttgggcatatacccaaagaatgcacactcatataataaggacatatgttcaaccatgttcatagcagcattatttgtaatagccagaacctggaagcaacctagatgcccctcaactgaagaatagagaaaatgtggtacatttacacaatggaatactactcattggaaaaaagcaatggaatcttgaaacccacaggcaaatggatggaactagaagaaaacatcctgagtgaggtaacccaatcacaaaaagttaaacatgatatgtactcactaatattttatttttagacatagagcaaaggattcccagtttacaatccacactgccagaggagctgggaaataagaaggataccaagagaagattgcatagtccctcgaagaaggggatgaggacaaggacccttgaccaaagtgggaatgggtgggagggaaaggaaggaggtgggaaagaaagaaggggagggggaggagaacaagagaatgaacacttcttatccatttgagttttgtctttggagaattctctgttgacatctgtaccccgtaccttatttgggtttatctattttcttgatatttaggtttcttccattctttgaatattttggatattagcactttatcaaacttatagttagtgaaactctttttcaattctgtaggctgttgctttgtccaaatgacagtatcctttgccattcagaaacttctctgtttcatgaggtttcctttattaattgttgatcttaatgtttatattaatgatcagaaagtcttctcctgtgccagtgaattcaaggctatcccacactttttcttctatcttgtacagttttatgataatttcttttaattgagtttagttcaaggtggtatatttgtatctatttgcattcttctacatgaaaccatccagtttgatcaacaccatttgttaatgatgctggcatttttccagtgtgtgtttatggcctctttatcaaaaccaattgtccatatgggtctgggtctttaattctactgctcaccttatctgtctttgtgtcagtaacatgaggttttgatactatagctctatagtgcaacttacccagggatgatgatacctctcacagttattttagtattctggattatttttagctatcctgaagttttgggattgttttatattctcatatggtactgaaaatgtctgtttaagaaatgaactggaattttgatagggattctattgaatatgtttattgttttcactaagatggtcatttatattatttcataactttattttatcccagaatttagtggaattgctttgaatttttctacatataagttgatgttggctatggccttgctataaactacctttgttatattgaggtatgtctcttatatccctaatctcttcatgacttttatcttgaagggtgttaggttttgttcaagatcttttctgcatctaatgagatgatgattatgtggtttttgtctttagtttgcctttatggtagattacatttactgatttacgtatgttgagcaatccctgtatcactgggataaaacctacctgatcatggttgatgatctttttgatgtgtttttgagtttgtttgtaagcattttatttaaaagttttgtatctgtatttataagcgaaattgatcagtaatccccattctttgttttttttaattttccaagagtcattttttactgtataaatgaaacagaatatttaccattttaaagcatataatattgtatattgtggtatgtttgtgtttgtgtgtgtgtgtgtgtgtgtgtgtgtattgaaatactatacagattcacaaagaaaaccatctagtaatatatattaagaaatgtacatgtagaaaaggtacacataaagaaaagggaacaaataaagatgaatgtgtctaggctgagagagcatccctctatggggaatgagctcccaaagtccatttgtatactagggataaatactgatccactaccagaggttccatagattgtccaggcctcctgacacccacattcagggggtctgggttggccctatgctggtttctcggctatcagtctgggacccgtgagctccccattattcatgtcagctgtttttctgggtttctccagtctggtcttgaccactttgctcatcattccttcctctctgcaactggattccaggatttcagcccagtgtttagctatcagtgatgactgcttcatttcagtaggggctatatgtctatttaaattgattatctgtttttgatattaacttttggtaaatgaaaattcttttaggatcctgataggtgtggacttccttgattccatgtaaaatgtgtttctaggtatagagagctgatgcttaggaatggggataggctattgggggtgctaaggttgtctacaggactaaagaaattagagtaccccaccaggatctgcttagtttccaggaatttgggcagatagtgatgaaatgcagcaccaggtggtcttctgcagagccagggatgagagtgggtgattggatttggagaggaagaagaagtgaacatctgcatttaggcttcctgcttctctggccaggattccctgctatttcccaagaaatgtctgctagggtagagactggaataaaacaatgaattgggaaaggtaagtttggatggaaagatctgtttgataaactgcaaatgagagcacagaggaagagtcggctacagcatatggtctgctataagcctggggatgaggctgggggttggacttagaagatccaaagtagaggagaagatctgcttttaatgtcccagcttccttggtatgctacccagagaaatttggttttgttcatttaccactcttagcatggtaccagataaatatatgagattaatagtgattattattgtttcttcaatacttctttaatttaaatgcttaaaacttcattaagcaagtcacacatatattcttaacctcataaaaattcatatatttaaatgctatatatctgcttataaatatgtctgcatgtatttataagcatatataccatctttgccataaaatagtatgtatatctgtgtgtgcatgtacatatatgtacatgaataaatattattaagcatacacatagaataatttttgtaggtacaaattacatattattataaaaacaactaagatctaattctggtatttatatatttaaataaattgtttccttattcatatgtggtatatgtgtatctgggtatggatatggccacaggaatgcagtgccatggtagtccaggggcgcttttttctcctggagctgaagttacaagtggttgtaagccacctgatatgggttctgagaactgaactaagatcctctgcaagttcagtacatgctgttaacttgctgagtcatctctccatcctgtgagtgctgaattttaacaataaaactacttggagaaaacaagtcaaacctaaactctgcatgagcacttcatgttgtatttacaactcattatgtcataattttactaaatataaatataatttttaatcaatatacatatgccagggacatatttaattcttcttcattgaaaataattgaatcaaaaggtactgtctctaccatagaaagagatcattttttttcttgactagtgggtcaaagtaaagttttgaaaagcaagtctgcattaaaaattctgcataagctgataggataaaatatttctagcaccaaattacttgagccttcttaggctcctaacggaccctttatagctctcttctacatattctataacatctctgtgatggccaagaacatcctttgttgtataccaatagatctcttgcttccaccaaccaaaaaactaagataatattagagactttagctgagagttcatctacttttctgtaacccacctgccttaactaaatagtgtcttcagttacaactttctaagttatgttgcttctatataaaaacatgaaatgatttctactttgtaacatgtaattgaatctgtgattctgagccatgtatttggctcaagaataatctatcccttgtcttctctgaagtaagaaatattcttttcatgttgataacactatgctatgttagttacccaccacttatttacataataacatcaatattacttttaagtggacaagtgcataaaacccatataaatatgtagtcattggagtctgtcaatctgttagtaaagattgaaacacaatgaatatccaaggagttgaatgtttactaaaggagataagccatgaaataaaaacagatggcccaatagttctttgtttgggaaagcagagttagccacatgacctgtatgaaaatttaccctcactgagataaagtgattaatcaaatctaatcccaagcttcatttaagaatcactttcttttaagctgtctgtaagggaaaaaaaatcaagggtcaaattctccttatgtatcctaaaattaagtattttttagctctaaacttctacctcatactactactacttgtgagtaactgagagattcagaatccacctccaagagagactagaatccattcttgtgctgagtatatggtagaagattatctctcttctgatactgagcaatacctttcacctccaccatatactggggcatcattgcttctgatcaaaagtctattttgtgacaagcaaatggccttaggtacaggtgttaaggtccatttctgaagttggtattgcatagtttcatgctaaaagttgtttcaaagggtattattccattttggaatatgtgtgaatcagttccttggtaacagttttcttgagaaaatcatcagagactcaatttgtgtagtgtactgaagacatgcttaacgcacaataaacatttgctgacaaagagtgaactaacattactctataacttccatatcctgataatgttatcaatatctatattttgctgaaaaccacaagatacctattaatttagtcagccttacacttataacatgagttcctactatacgctaattatttttaaattgtcttacagtacaagggagagaccctgacatttaattcaattatatttccaagaataatagcagtcaacaaacaaaacccatacagaataacagagaagtatgactggtccttgagagtaaagcaatgtggcctgttaaacagataagacagaatgaggttttgcagtgtctatttgtaacccttcttagtatgttatcagatttaggacatagatttccattttttttaatcatgaaattacaatatttacttcagagtactgcagtgagagtaatcaaagcaatgtatgttcagttacttaatatattgctgagaacaggataggttctcaacaaccattcacgtgttgattttacttctgctttatcagtaatactattactactttgtcttattgtgaataatttagaatttgtcctctttcttcaggagttatgagccagtctgtctctgttgttacccttcccaaatcagtggtcagcagtttcagttagataattcttcatgttataaatggagtcatttatcaaaactaaccaaacgtcctcctcaggcacaagacaaaaccatctagaatattctcttcccactgaaatgtgcactcgtgtggtgacacagaaatcagtatagcaggaactaatgatctgattccattaacaattgctcatttgggtggtaagtgacctgagacgaaggaaatgcaattttccctgccaatacagtaaaaaaaaatggctgtcattacagttctaaaaagattataatcaatgatactttttattggctcaattgaactacattgtggccaattaaatccttgttttgatgacattgtgcaaaatgagagagttaagcagttttttttcttcttttgtcttgcaaaacactaagaacacaacagctttagccttaatctctttcaaaggccagaggtaactttgttgtttgcctgatgtgtccttgaccatggaattgttttatctgcatgaaaagcatcattaaataccatttgcattctcaaaggcacagatggtcatcctccagtcaactcctaagacttttccctattgtttcttaaaataaataaacaaataaataaataaataaatgtattagaattgtgcttaatgcgaaattggtaattttaaattcttatttttatttgtgttcatgtattatatatatgtgagcctcacaggtgtgtacaagtatcttagaggataggaaagggaggcggttccactggagctggagttataggtggctttgaggcattcaatgtagatgctgagaaccgaactcaggtcctctggaagagcagcaattggtctccagtcccaaagaatttaggagtttcaactgaggttttgatctcttaagtattgtacaataacatttaagatctttaaaatgagcacactccctttttgtccagggagatacagcattgaatatccacatgctatgcttttccaggtctttttgtgaaatcatcacagtacacatatttgtgatccttagccttgtgtgggagcactttcccaagcagttgcaacctggtagttgctaggtttcatatgaatgacatttatatttctgaaagacatgtacccctgtatcctataaatataagtgataccatgcaattcaaattgatggtagtctatagactttggtattataaaaagatgatgtaagagtatgtgaagaacacctgtcactaagtcagatgtctaaattattttcttatccctaacatccaaggaacaaacatagaaaatcctgagatttttttctggttatttacttaaatgtatttttgtttcaggcattactgatcacttaatctatggcaggaactgtgttaaaagctaaatgtgcaaagattaaaagcatatgattatccctctcaatattttttaaagccctggcattttataaaaaattaggctaattttacttttgattagatgtcgctgaagagggttaggtatgctacttggcaaaaagtagactgggttttctgtgtagctgtagtaattctatcaataatgtgaacacagtagttattataataagtataactgattcttgctttctaggaagatattgggcctatttgggtgtcagttataaggatcatattgaatcaaagtagaaaactgtcattgtacatggaataaatagaaatatatgaattaagaagggtgatgcttttagaagtccttctgtctcatgaggaggcttataattttaagtgacttttactacttccttcaaatcagaaggaccagggaaagtatatcacatggtgttattattacaatttggtggctcatttgattaagttgccacctagagtaaaaagctacattaaaaacaaaagtttgctaaaatagcaatgagtaaaaccttaccaccccaaaaagcattgaaacctttacttccatgtaataccctaaattagaaataagttcaacaagcagccaactctgcaattcaagatgccttggctacagaggaaaatagatcacaaataaggcaatgcttgtagataagaggtggcatgtgcttaactcctccacaacatacaagaaagcatttaaacttcagttcttacaggactttccccatgttttctccgacagatatgaatcttatacccaatttagctatttattttccttttattcctgattttcttttaaatttctatcccatcttgaaattgttccttgttttctgcattctttgcatagttgccaaatccaggagaactaaccctttctttgtttattatttccttgttggaccacctcatgtgaagtaagtacttggagagcacacatacaaattcataaatgcatcatcctgacattactgtgttgggttttgggaatagtggagtttgtattgatgggtattttcctccctgctattttcaaaatcattattttttgtacacaatggcataggctatatctacaagcatgtctgtatttacacatttctatatgtgcatgtgactatagagtaataaaagatagcctgggaaagtggttcaatcaataaaaatcttgccatggaattaggaagaccagattctactcaccagcacccccaaaaccccaaaatagcactagggccagacataggcagccaagtcctaacatttgttgttaaactagtctagtgaactgctgagtttcaggttcagtgagaacacttgcaacaataaacaaaagggcagagagtctaaaaatgatacctgatgctgttttctgacttccacttgtgtaccacacacacacacacacacacacacagagagagagagagagagagagagagagagagagagagagaggaatgaatgggtgtgacaaggatctcagctgtctgacagcaggctatgacattcattcaaacatacgatgtacatttactagttaagtgtcacatgtaatgtgtgcttattgacatcctggctctggaagtagtattgctttctccctgtttcagatcaaagtatgtttgtaccaaagtgtcctccaaagtctggaaaaagaatggccctctgactctgtgacagggacagaagacaagtgtgtcttcaaaaccagtggttcctattatgtgtcccataatagaaagtgcaagctgtgagagtttaatctcagaaattcagacaaggaaagcccagccatggacagaaagctcacatggcaactccaactgactgattcagtttcccagtggatttcagctgaatattttaagtgtgtagtttgatgatgttatctgtatctgttgttatttgttcttttacttaaaccgtcactcaaggaaaggggagtctattagggatgctagctggctgccttaaaggggccttactcagtccccttctgctgggtgttttgagcacctgatgtgatgttttgtcatctctctaagtagctaccacttggtatttattctttcttctttgaccagctatatgagcagtaaatatactcattccaaaccaaaagtacatctgttatagatccttcttgaggccatcgagaacaatacaatatgctctcaagatcagttttctggcaatgttaattctaggaaatggggaaaattaacagaaaactctagtgtatttttggcacacatttttgaccaccaagcaaaacttgaaactttcaaggtcaaattgaaactgaaactgaccaaatggctgttagataaatgaatgtggtattctagtattttggatagcaaagtcttacaaattcacctggatgaaagaaaagattagtttatcaacacatattcaaaagtagacacaccgcattagatagcattttttatacaagcaacttgtgattcacatcgcactacagattgtgttacagaatttggctgtgtagataaagcacagttttcttcctttattctttcagtaaatactcaagtgcttgctgagggacaaatgccatgtttttggcatagttccaccctttgtaaggctgacaatcaaatcacaaacacaacagaaaacaataagaaacagatacagtgccatattcctaggaggaggacaatgtagcatggtatatgatagaacagatgacatggcactgagcaggtatcattaaaagggaaggccacatggaaacttggaagtgagaaggaatcagtataaaaagtgcagagaagacaagttctagctaggaatagcacaggttcctatctgatgtttccaggagatcatgcaaagatctcctatgctcctaaaacacacaaagggaataaagaacacaaaaagatgtagtgtaaatacagctttatagaaaattaaggaacacttaagttgcttaacacttaaaggttttcaaatagacaaaatagacttttcttttgttcacttataaagtgaaaagcaaagaaaaatcagagggtggagaatctgcctgtggtggcagaacaatagaccatacacactgacagactgagaaagctaaacatttgtttctatccccccccaaaaaaatctatgttcagagtggaaaggcaaggtaagctgaacccacatgagtgcaagtactttagggagcctgttggattcaaaagtgtacattctagtccctgggcacatctgtgctcctgtcactgtcactaggattcatcagagcaagagtttcagtgtgggtgacttctcattaaaaactgtcccttggcagacacccactcagcatcactaatcagctctccatccagagggactttctatttctgtcttttgctccattaactaggagtcctggcagggtggaggttgaaaagtagattcaagtaatttcaatatgatactgctagatattatcttgaaaaaagggggtcttctttggtattgttttgttttgattttgagtaaacgttgctacttttgtagttcatcagtacacacaaatcagtgacagcatccacactttgtgggtgatctcacagagtcttgagaatttccagaaagcagccttgcatcacatcactgcagaacacattatccctagacagagaatggagcactcagagtcaacttttctcctccctgtgagcccctgggtcagtcacttagtcaatttctttacattttcaattgtttaattaccacaattcaagaactattttattctaaaatttaaacttgtttgaaagataggctcccaaatgcctttggggaaatttatgggtaagcataggcaacaatttatctttcactaataccttagcaggaaaaagtctaaatttaagaaattgagcaatttagctgaatggtggtgacatatgactttagttccagcacttgggaggcagaggtaggcagatctctgtgagttcaaggccagtctggtctacagagcaatgtgtcaggacagactccaaagctacacagagaaatcctgtctggaaaaaccaccaataacaacaacaaaaagaaatggaacagcttattacaagttcttaggacaactttgccccaaaagatactacattttctgtttgtttctggaaggttaaaggtctccaacctacctgtgggagaaaaattacctctctttcacctgaggcctgactttctcttacaagtgttagggatctgaactcaggtctacacagcattttcctttagctcagaggacttctgatatgatttcttttaggtaaagtatgaagttcacccaactgtttctcattcatacctctgccctgagagtgttcaggatttagaagtgtgtgttgaccttttccccttcttgatatatttaagattccctatttacacatggtggcctacattgattaaggcaaagtgttcattgtcatatttatatctcattattcagggcatttatgtgtatgtccatttcacttatttgttcttcctagtgtcttcaaagacaatcatctccaaaactctttcctgtggaacatgtgtgttcatggcttatgaagtttcttgtaccagtgtgtttgtaagttttatcaaatttggagatgttagagccattgcttttataaataatcttctgaagccagattctctattccaggcttctaatggtacatacactagaccaaccttgtttacagctccactcatttttccagtactttttctttttttatgatttcagtcctatatattcccagttataaatctgactatataacttagaaagataaatttagtacactattcatagaactaagtgtatattacaatatattttattcaatacataatattttacctgaattctgagttcagctttatggtttcatactctcttcaaaaaaggaaagaaaagacaaactgcaaatttgctcaaatctgttgagactcagagctctttcaccttcttccctgtaggatttatctgcctcatgcagcaatgtattaagcactgtaccctttgatccagtaaggactgatctggcatcatttgtgattagaagaacaaaaataactgcatttaaataactttaagactcatagatgtttagaaaatgcatacaaaaacaatagaacatagcatgttctatgtcattatgctataggaaagtaggaaattttgaaaaccaatcattaaaacaaagctttgtatcacaacagtctataggaatcagttatataataaaaacttactacttttcacgaattgaggagttatacacaataagaggattaaagccagcttactgggagatggcttcttttagttttaaagaagggtaaaatctcagcaacataaccacctattccatttttgtactgttctaataaaactattatctaaaataagttatcctgttgacaatgatatttaagaaaaatctgaactatttcagcaaaataataaatcatttaggaatcagattgttctttcactttctatctcagctcagacccagggacttattcttcctcttagataataaggaaggaatcatgtgtgtctgtcagtagaggggagtgagaccacgggtccttcagtcagtatatctggatgtaaacagagaagtcattgtactcccaggaatgctgcactcaactgataaagctatgtcacacactcctcttgaggaacatgaagaaatggtagagttttatttattgtttgtttgttttgcttaattttgtttttgagacagagtttttctatatagccctggatgtcctggaacttgctgtgtaaatcatgctgaacttgaactcacagagtttcacctgcctgtgcctccaggaaataaaggctgtctgccaacctgcccagtccactagacagtgtgttattcactgtaattttcatattttggctatgagtctattgtatctatgagctgaagggtatgtttttgacatcaacctttgtttttttggcatgtgtacatctcactaacataagctacagtacctattctttaactatacaaccacctccttggatgctattgatttccttatactggatgtacttacaattttaatgacaatgtagtttggctgctaaatatttctgcttatttatttaaaaccatttgggaaactaaaactgcttcaacatcaacactagcttcaatcttccgtattctatttttatgttttccttgtattgctattgttcattaattgattggcttttccagcctactacagcctccctagtctgttattcagcacagaatccagcttctgtgacttcacagcctcactctaaagtgaaagtcagtgttggtaacatgaccaagtacacgtgggttgactaccaccacacaagtttatatcctagactgacttctgagttttaaaaatagaaaaatatggaggaagagatggtaatgcaagaataggtagatggtagtgcaagaatacattcatcaacttaaagagcaacatggcaccactataacctaatggcaagacctgaaaaatccaaacacaagtgaagcagaaaaaaatgaccttaaaataactttatgaagataatagaagcccttaaagaggaaaggaaaaattatcatagaagaattgaggaaaaaatggaagaaatcaataaatcccttaaagaaagacaaaaaaaaaaaaaactaatcaaactggttaaggaaacagttcaaacttgaaaattgaaatagaatcaataaagtaaacacaaaccaagggaatttaaatctgggtaaatgggactacagatacaaccataaccaacagaatgcaagagatggaagagataatctcagggtttgaagctacaatagaggaaatagatgcattggtcaaagaaaacattaaagtcaacagagtcatgacacaaaagattcagaaaatcatggacaccatgaaaagggcaaacttaagaatagtagggatagaagaaggagaagaataaaagctcaaaggcacagaaaaatatattcaacataaacattgaagaaaacttttccaacctaaagaagaatatgcctatgaggatttaaaaataaaagcttaaagtacatcaaataggctggaccaaaaataaataaatgattaaagttcccttaccacataataatcaaaacactaaacatacaaaataaagaaaaatattaaaagctgcaaaggaaaacatccaagtaacatataaaggcagacccacctctcagtggagactctaaaagacagaagatcctggacagatgttttgaagatactaagagaccagaggccagcctagactactatacccagcaaaactttcaatcaccattgacatagacagagaaaaacaagatattccatgacaaaaccagatttaaacaatacccatatacaaatccagccctatagaaagcattagaagaaaaactccaacccaaagaagtcagctgtgtccatgaaaatacaggcaatagataatcccacaccaaacacacacacacacacacacacacacacacacacacacaaacacaaacacacaccacactgccaacaacaacaataaaaccaaaaaaataacatgaattaaaaatcactggtcattaatatcccttaatatcaatggactcaattcatctataaaaaaagacacaggctaacagaatggatataaaaagaggagacaaccttctgctgcatacaagaaataaatctcaacttccaaagacaaatattacctcagggtaaaggtttagaaaaactttccaattaaatggacctaagaagcaagctggtgtagctattattatatctaacaaaataaacttcaaactaagtctataagagctggacaaggatatttcatattcatcacaggaaaaaagtctatcaagatgaagtctcaattctgaatatttatgccccaaatacaagggcacccacatttataaaagatacattactaaagcttaaatcatacatcaaatactaatagtgtgcaatttcaacaccacactctcaccaatggacaggtctaccagacaaacaattaacagaaaaataagggaaccaatagattttaagactcaaatcggattaatagacatctatagaacaaaagaatatgcgttctttcagcacattatggaaccctctctaaaactgacaattcggtcacaaagcaagtctcaatagataaaaataaaaaaattggaaaaaccacctgtattttatcagatcaccatggtttaaagttagaattcaaccacaccacaaattacacaaagccaacaaactaatggaaacttaacaatgctcaattgaatcacaactgggtcaagaaagaaataaagaaattaaagacttcctagaattcaatgaaaacacatgtacaacatacccaaacttatggaacaatgtaatggcagtactaagagaaaagttcattgcaataagtgtctacataaagaacatggagaaatctcacagtagcaacttagtagcacaccagaaagccctagaacaaaaagaagcaaactcaccaaggaagagtagacagcaggaaataatcaaattgagagttcaaatcaataaaatagaaacaaagagaatgatacaaagaatcaatgaaacaaatagtcagttctttgggaaaataaaaaatgatagaaaaatccttatccaaactaacaaaaaggcagagagagactatccaagttaacaaaaccagaaatgaaaaggggaacataacaacagacactgaggaaatccaaggaatcatcaggtcatatttcaaaaacatgtactccacaaaatcagaaaatttaaaagaaatggacaattcgctggatacgtactatataccaaaataaagacaagataaactacttaaattgacctataacccctaagaaaatagaagtcattaaaattctcccaaccaaaaagagaccagggtcaggcaatttcagatcagaattctaccagaatttcaaagaagagctaataccaatactcctcaaattgttccacaaatagaaacagaaggaacattgtcaaacaccttttatgaggctagttaccctgatacttaaaccacacaaagatgcaacaaagaaaaagaattatagaataatctccctcataaacattgatgcaaaaaaatagtcaataagatactggcaaaccaagtccagaaacacatgaaaaataaatcatccattgtgatcaagtaggagtcatcccagagttgcagggatggtctaccattcaaaaatctgtcaatgtaaaccaccatataaacaaactgaaagaagaaaaaacccacacaatcatttcattggattctgaaaaagcgcttgacaaaacccttcatggtaaaggtgtcggagatttcagagatatgaggaacatatataaacataaagtcaattcacagaaagctgacagtcaaaatcaaattaaatggagtgaataccaaagcaattccactcaaagcaattctattcaatacagtactcaacattctagctagagcagtaagacaacaaaaggagatcaagtgatataagtgcaaagaaagatacccccaaaattctaccaaagaagtcgtacagctggtaaacaccttcagtaatgtggtagtgtacaagattatctcaaaaattagtacccccttatgtataaatcataaactgatgaagaaagaaatcagtgaattaccacccattagcaataactacaaataatatcaaacatcttggggtaactcaattcaaacaagtgaaagacctatatgacaagagctttaagtctctaaagaaaaaaattgaagaaggtatcagaaaatagaaagatctcccatgttcttggatagataggatttatcaacatagtaaaaatgacaatcttagcaaaagcaatctacagattcaatgcaatccctatcaaaatcccaacatgattcttcacagactttgaaagaacaatactcaaattcacttcgaaaagcaaaaaagcttaggatagctaatgcaatcatgtacaataaagggacttctggaagcctcaccatcccgacttcaaactctactatagagtcattgtaataaagacagctttgtattggcataaaaaacaaatgtgcaccaatggaatcaaactgaagacccagacattaatccacacaactatgaacacatgatctttcacagagaagccaaaactgtacaatgggaaagaagaatgcattttcagcaaatggtgctggcacaactggacatcaaatgtagaaaattgcaatagatccatatctatctccatgcacaaaattcaagtccaagtggatcaaagacctcgacatgaatccagtcacactgaacctgatagaaaagaaagttagaagtacccctgaactctttggcacaggagaccacttcctaaatataacaccagtagcacaaacactgagagtaacaataaatgggacctcctgaaactgaaaagtttctgtaaggcagaggacatggtaaataagacaaaacatcagcctacagaatgtgaaaagatctttaccaacccatcctatgaaagagggatgatctccaaaatatatacaaactcaagaatctagacatcaaaataccaaataatccaatttaaaaatggggtaaagatctaaacagaattctcaccagtagaatctcaaatggccaaaagacatttacagaattgctcaacatccttagtcatcagagaaatgcaactcaaaattactcttcagataccatcttacacatgtcagcatggctaagatcaaaagcactgatgacagcttatgttagagaggatgtggagtaaggaaaacactgttccactgctggtgggagtgtgaacttatagaggtgctttgaaatcgtatggaggtatatttcaattagatagatattcttcaaaactttcaaagaccttcagaatatggcatttaaaatggcttaggcttttttcatgacagtgaaacacaatggttcctggcaataccaattacatctgagaggaaggtgggcatagaagaaactcattatagagtttgctttcaatgtggtgagactatccatttgagcaagaaatggttcttacttgaacttttgactgtatgctatataaagtggacatacaagacccacaattatgtgactgctgaacttgcaaaacaagatgggacaatcctgaagggtccctacttcatggaagagtctgccagacattttgcaggtcacagagaataatgactgacaaactgccaatacaggtgggacagtttcaaatttcctgcttcaatgagaagccatagccagtggccagcagtttcatgattaatatagtatttgtgtgatcatttgtgaagtggcagtggggtctagcctggccaaaaatattcatgatacacataggttcagcataaacacttcttaaatacttcacatttctaatgcatagcataagtatgttgaaaaggtatctgttctgccaaaactgaccaaataatattatttcagaatgtgcattgttctttaatttttaggaaaatcttgtccccattcggcataagtactgtgagaatcttagcaaacactgttttaggtatgtcaatcaatattggcagaaaaaatacacattttatatacaaatcatcaatctatgaacatagtgtgcctttcttttatttggggcttttaaaagtatttatctttaaaatttcaacatacttatgttattcaatttttgaggcagtgaatgcaggagtattttattttctgacatcataattaatattttgctaaataagtttacatttaacttccatgtataattttgtcatgtgataattctgtagcaatcaagaaaattgaaaaaattgtactaaagaaaacattgattctaacttttatgaaattagtgggaggcctggagagatggccaagcagttaagagcacttgttccagcacccatgtggtgggtcacaaacatctgtacttgtaaaagggtatttcatgccttcttctggactctgcaggcaccaagcatgtgcctggtgcacagacatacataggggcataagaacttgaagtttaaagctattctcaaatttgaaaatataatgtacaatgaaacaggtaaggggcttacacaaagtatgatagatgagtcaattgagaaaaattccctatttgaagacttttaggataagaagaactatgtacaaggaacaattttgaaatatgagatatatcagtactaattattctaaatgcaaggataaatatcattttaatgaacccacaaaatggagcaagcatgcttgaaaaatgtaggcaaagtgtttaattgaaatgatgtaataatacagaggaattatggtgacaaagcttaacaagaaactactaaaaatggaaaaatcatatttaaataaagtctacacataacaggtagacacaaagaaatagaatatttttttgcctcttgaaatgaaattctttgaatacacccaattattttcatgatgctgaagtagattctaatctgaagaggggaagacctagaacagatgagccactcagaacagaaataagatatagacttccatctagaaaactgtagctgaaggaccaagttcccttagctcccctcactgaaactgaagtaaccccaggcaaaacccacctacatgacatatttggcagccactataattgatagtgtcatgtgccacaactcagagtccaaacagttaacttgctctcattttcatataatcagatataaatactaatagaataaggatgtaatttatgtactaaaagttaaccagaaagagaataatgtcaaggtgtgtgctctctcattattctgggaaaaaagaggatgggaatgtatctaatacaaagttctattagataagtagtattagagccctgagatcagaacattatatagactgaacaggtatatttagagacacacacacactcacacaaaaaagtaaaggaaaagaggtaattagtttgaaggagagcaacataggagtacatgggggggttaggaaggaggatgggaaaatgatgcaactatataatagccctaaaaagtaaatatatatatataaaattgtaaagtatcattaaaactttcatggtcattattacaatagtgtgtgtttaatatgtgtgccattgtgtatgtatgtatgtacagcagctactatgaaggcttcattgatacacttgggctataaaaagtgaatgaaacaaacaagtcctccattctggaaacctaatatgcaagatggcttgagaaaactaatctaaaatgtttatgtatattatatcatattatcatgaaagacaaaaatgggaagaggaagatagctgcaccattcaacattaataaaatataaaatccattctaatgacactgaaatgtcaagggatgaagacagaacatatagcaagaatcctacctggtacacatgaccatggatttgattcccagttttgcagaaaaaaagaaatagcttataactgttgaagctacaatctacaataaaatttccagtgaactcaatacagagttcaataataagtctctgagttcaggtctccttaagttcagagtccggtaaattttactctccctatacctctatttcctccactataaaatagagataatcatgttgttgctttcatgagacttttgagagacatctagaaaggtgattggctcataaaatttgaatttgttagtgtttggtatttagcatcacattattattattattattattattattattattattataattattaagaggatccatctctccagcctctgaatctggccatttgtgaaatcatgtatctttccagtatccaatgggaaagtctccttactgtggaatattttgaccacactctgacactaccaagactgacaataaaatttactttgaattagagggtggggctagctactagctaaccaaaagtaaccattgaggttttggaagactgagaacatgtaaagagacaaaggaagtagaagagtggggcttagaaagatttttgacccttttggattgaggcgagagagagagagagagagagagagagagagagagagagagagagagagagagagagagatcattggtcacttctctgctaattctctgatcattcagattcttttcctaatatctaactcctgagtttttattgataaagaataattagataaatgcttcatctggtatcaacagggagcatgagatcacgaggcagctgccctgacactacaactagagctccctccctcccaccaggccctctgcatgagtctggggttttccctgttgcggcctccagctgctacctgtcccaggccccaaaggccacaggtggttgggaaccaaatactgccagaattagcacccactactagctggttctgtaattcaaatggcaccacgacctaattttccaacacatatgcttcttctacaagtctccctgtgtccacttttcaggaggctggtcactctccctatgggttgcaggctttctcaaagcaccttcatcaggctactgtcacatcaagtcagataccttgacatgtattttggtttttgtgctgttgccactgccacacactgtcagcccccagctatgtacaagcatctacagctaccctcatccagactgtgcacttcctccattctctgttcaaccatgtggtgcagtgacagccatctgcccacttcactgttgtctcactagaccttagtgagatatctggaaattgttgaggggtgagttaattttttttaaaaaaagaaaaaatagttttacccatgttaaaaatggcaaacaatattacaatgcagaatgttatgtcactctgattccacagcgaatggtttgaaagagaaaaattaaatgaagggataagcaatttagctggaattggcataatgttgattgtaatcatcatcacttggtaattcatgtttgacctttaaaaatggtttgccaaatacaaaaacttgagtgataagacacaagccttagaaggacatactaatgaaattcagaaaaaatattcacatacagacagatgagtttcagcagaacatactgggccattgcattatgaaactgaaaaggaacagcccatggttattagaaaaccaaccttaatttatccaattaccattcaataatggctatcaggtaatatgtaccccaaaactattcagaagttaactggtatcctgagaaatgttagatttgaagagatttaaggaagcaatagtttcatacggcatgcatttaacttttggaagcagatgttaaattcatggaccactcagagaatgatttacctacagcaatattgaaggctggtcctcatttacaaaggaaaacatagtggagagaggaagctaggatcatagaacaatgaaataaggctaaaggtattgaaatttcccaagaacagcctctcatagatggccagtttgctgatttgaaagacagattacaactgatgatcactccttggctctatgctgtatagcagctttgaatgcttgggacagggttgaagaataaggaaacaggacagagtcatttattaaaattatgcaagaccccctgatgggggttgtccttctgtatatgtatttctgttattggttgatgaataaaacactgtttggctaatggaggaaggaagataggcagggataggagataaggagaattcttggaaaagtaggcagagaggaggcactgaaaagggatgccatggaggaaccaggagaataggatgctccagatattctctggtaagataagaccatgtagaaatacatagagtaatagaaatgggttaataattaagaaagagctagacagtaagaagccctagacggtaagaagccctagccattgtccaacaattttataattaagatagtgtctctgtgtatttatttggggctaaaattgggaaggtgggacaagaaatttcagcaatacccccatcccaaaggcttcattgagtattcactaagattgacttcatctcaaataattgttttctagagataaaccaaatagaaggccccagtctactgaaatatgcagaaagtatggcaaaggcttgcattggattaacacatatatataaacatcagacaagcaaggtaaccctttgccatcaggacaagtgttgtgaaataattttgttgttgttttttgaaacagggtttctctatatagctttagagtctctcctggcactaactctgtagaacagactggccttaaactcacagagatctgcctgcctctgtcttctaagtgctgggattaaagttgtataccaccactgcccatcatggaatactattttaactgggcaaagatgtgtgacacttgttaatgctgtagaatattactttaataatttgaagatatgttacatttgtttcttctgcctttgctaatgatgtgaagatgtattacatttgtttgtgatgcatttgttaagtatgtaaagatgtgttgcatttgctttaattaagtaaaattgacctgggctcagagaggcagggttagcaactggttgacaggaaatagcagggagaaacttagcatgggtctttttcaattggggcaatgtggaagggagtggcttccagggataatagctaaaagagaaagttatccaattgctattcttatttttggttgtttgttttttttttttttttttttttttttttttttttttttggcggcggggggcgggggttcggggagcccaaacaacaaattcctttttagtaattttcacatagtatgtttaatgaggggggaggggtttgagaaccaatgaccggcaccaattgctattctaactctctgagatcacaagttttcaccctagcctttgaatcctgagttttattagaatgataccgatttagttagaagtacttttagaagcagcaacagagtcaaggggctatggacttagccgttgggatgctagtaatttaaattgcagctactctgatgaaggtaaaacagcacccatgtcaaatttggttcaatcattccctgttagcattgtgaaaactcctccacagagcaattaaaagacttaatgcctgttgtgaaaaaccacacttctctgtgtaacagaacagcttcagcagataaaacaaagtttttttggcaaacttctataaatgatcaaagatcagattggcctcttcaggaggtaaatgttcagtttttagggattggaactttatctcaggtaaaacaaagtgtaacatggttctaatgtacagagtcagaataacagatagaaaaatcaaagccatattttattagcatagcaatgaatttatggggatgtgatttgttacaataatggaaaccctagataagcattcctctcatctcagaaataaaccataaagtaatgtatacttctgagaaaatattgaaaggtattatcaaaaacagtcactgactattccggttctacataagcagggcacaacagctgctgatctttcaaaggtacaaatagacctacatgtaaaatggttaactgaaaaacctccctgggtaagaaaatgtcccttaacatcagaaaaattataggcatcagaacagctgagacaggagcagctaaacactcaacatgttgaagaatataccagtcgctagaattcttctgtatttgttattaaaatgacatctggaaagtagaaaagggtaacagatgtaagagctattattaatgtgatccagccaatgggccttttacagcctggaatttcgttttcttctttattacctaaaggatgatctgttatggtgactgatttaaaagacttttttttttttttactatacctttacaaaaacaggatagagaaaaatttgcttcacagtgcctacttctaataattctgaacctgttaaatggtatcaatagaaagtttttcctgaagagatgttaaaccttgtgtcagtatttgtaagcagccattggaaataatttataggtaacgatttcaaggtcaaatacagatgtaatttggacagacagatggtcttcaaacatttcagagacctacagaatatgttatttaagatgttttaatagcataatgcttttcatgacagtgagacacttctgctcctggtaacaccaatatagttttaaaaaggatgataggcatccaaaaaccttcatatggagccaagtggtggtgcaacacacctttactcccagcactcaggaagcagaggcaggcagatttctgtgagtttgaggctcgcctggtctacaaagtcagttccaagacaggctctaaagctacacagataaaccctgtctcaaaaatcaaaaaaacaaacaaacaaacaaacaaacaaacaaaaaacatacagagtttgctttcgttgtggcaaagttaaccactggacacaaaactgacagtatgctttccaaagtggacaagcaggacacaaagtgactgatgaactttgacaagacaaggtaagacagtacttcaaaaatccctgctttacagaaaagtctgacagatgttctaagcctgtatgttgaaggtggatgccccaatgatgaagaggaaccttgggtgacttttcaggcactcaaatgttcaaatgtctctgtcattttgatagctttagaagttctttgctcagcacttcctgtttactcaggtaatattatatcaattttgagtgtatgatggggtttaagactagataattacacttatagtcttctttgttaccaaattcaggaaaaaaattcacaaaagaggtataacacatataagattgagagataaaagcttaaattgtttagctaagaaaatgtttttaggtcttaaaagatagttattttattattatttattagtattttctctgaatttgccaaatgcagatggactggacattgtgaatgtattcctattacattgtgaatgtaattcttacctgataattgttcttaatgtatataattttactgagttagagttaaaaccttacctttttatttagacaaaagttggttaaatgctattggacattttgatcacactctgacagtccaataactgccaataaagtttactttgaatcagaaggcagggttagctactagctgaccaaaattagccacggaggttttggaggactgaggacatatagagagaaacaggataaaatagtgtgggtcttagaaagattcctggcccttttagataaaggaaggggaaagagaggagatcactggtcacttctctgctgttgttctgatcattcagcttcttaccccaatatctgactcccaagtttttgttgataaagaataattagataaacatttctgctttttcctttgatgaagttgaaacatgcaaacagctttggatgttggagagggagcatctctgtgaattccttctggaatctccttcatgtttccctgtgcacaggaaagacctagctgctgacatatcatcttccatgttatgctgaagaggatggagaatgtatgtttctctaatgccactgctaacaaatggcaagattcatggcttaccatgtggagatttttctcttaatagattccaaaaaaaagatgcttgcaggtctctctgaattctctcgaattttctgctgactctggggcctacttgattttcagataagttattgaaatctttgtgtctctttgtgtctgccctcatcttatacccaatgtatgtccctttgtgcatgtccttaataacagtcacgaaacataagttgcaaccgactccatttatctgacctccatccttactttaattatatctacaaagaacatactttctaataaagtcaatttccatggtatcagatgagtaaaatctctcaggaaacactacttaagccattaagacagcacatgtggtatgagtagaaagcaaaacctgttttcaattattatcagctaggatcttttagttaccatagttacaatagtctcatcctaatttttattcctctttacagaaggattatatctgatttgaaccagtacaaattattttaattgtaggcatttgttcaggtataaaaattttcagagcaatgtataatataaattaatttgttatcagtaagtggtcttacattaataatacttagagcatttgttattagtctagtgaattaaagtatacacaaaagaaaattattcagtttgtgaaccaacagaactagcttgaccattttaacttaactaataaatcaattaaataaaaatggccaaataattgcaataactatactgtaactcacatatggagatggcacctagttttaaaatgtgagagagggttaacatcatatattctgtacccaggcattgttagagtaccttctcacatattttaactcatttttcccttctaacacggcttctatgtattataatttccattttatgcataatgaatctatagcacagagaattttagctaggcagcccagaccataaagccagcaaagagtagattctgaattttaatctaagattactggctaaccaaagctgtcttcttttctttatgatgctgtgttcatagactgtactaactaatttgatttacttgttcaatgactttagagattgaccgaatcacttacagctgatggcattatctgtagacaccccagaacaagttgctcacattagaatctattccatctctgcatggtaagctttgcagaacctagaagggctaagagaagtctgtccccatcctttgattctgagcatggtgactcagaagttaaagggaagaaggcaacagtagtaggatgcttaatcatttaaaatattgatttttttgttgtatcgttgcctcattttagtatattttatgaagtatcaaaagagtctcttcagtcattcattaaccaaaattttctgtgaaataactaacattagcacatagacaactggtacaaaacatctcatttatcaaaggccagagtgtccacataattctatgtatttgtatagaatattatgcttcatcttttgcctatgagtactctgttgtctggataaaatgaattctttcataactgtttgtcatggatgaatgtgaaagttaatctgatgctaaaggtctgaaattcactatgacttagggaatcacaaaattaaatccagtcttattgtcaggaattttaaaatagtctaagttttatcttaaaacacatataaggtctttctccacttttctggctctttttaagtaaatatgcaaaatagataatatgagaagtggataatactagaaattacaggccctataaataactttccaatatttgaagtggatataactcctttttaaaataccagcatgtgaattttaaatgggttgtgcttttttgcagtacaagcctgttaagaagcactttgggaaatcatctatcacaagtgaagtcaagtctggcctcatttactcattgtgcttcctgtatttcagctatgtgacccttagctgctaagttgcagttttagtccctgtgctgtaatttaactagtataaaagtgattctatcatgtcttcaaatactttccacatgtctagttttgttgatcattttggttccatatgaaataaaattcagtcaaaatgatttttcagagcttaaattgtcataagttgctcttaatcacaaaatgaaaattcttcctagattagaggtgagtttagagatctataaccaatagatgcagtccttctcagcaatcaatattatccccctctgcaatttttgaagaactcagcttaaaggcaaaacttactatatttgactaaattcaaactcaagtgttcaactttatgcttaaggatggctttccttaatgatctctgacatctagctgatagattacatatgaaatgacagtattgtgtacatggtctttaaaagtgggaacactacatagcaaagtatatatctgagatatgtgtgccacaaagatgtggttgtgagagaatcaccatttcaaggctcctatgataatgatagtttcttaggtcacaagcagaaacaaacaagctttctccccaaggggacagggtttagaaaatacccattccagtgatatgcctctgccttagaggaagaaaaagggagaatacaaagctatccatgaaagtttgaactatgaaagaagagtgtaagacccttcaaatgggatatcctagctgagatagtataggatacccaggagctgcatatgactttgtgtgatagtcattaatgcacgttcaaaggcaacatgaataactagaaatgcagaaataaaatctgttaaggtttcacacttaaatatgaatattgaagagttataataggaatgcaattctcatgcctgaactgctcatgatgccacatttcagaggaaatgccctgaaacctgaatctaaccagcaacctctacattgaaaacagtgtgatgactgttgaaggaagagaaagtttcaaaataaaggaatgaaaccactagcagagatatggttaaggatgggggatggatgtatcacaaattagatggattgttcataggaagtaaggtgaaaaaatcccaaaaggaaataggcatcataaaaccacagagtaaagaaggttatgcttgtgagattgcaactgagattgtctaggatgaagagaggatccctttaatcatggaactacacaaaccttctgcaacacagattcttaaagagatgagtgagaaaaggaacagagacaaagaaatatgatagttcatcataatttaatttaaataactgaatttgaagtctcagcactgcaaaaacattaaataattcagataatttaatatttttaattttaatattgtaattgttttaatattctcatcacagtttatctatttaatttggagagacataagtgccatggcccacatgtggagataagaacacattttgtggtggccaattctgtccttctatcctacaggtcctggtgatcaaattcagtctgtgggctttgaaagcaagtgcctacaacatgataaagatatttctgaccctaagatacatctttttaacattaggctattagaaaatgcatgaataggtgaatgatttacattgctctaatcagagagcttacaacagtctcacatgaaatgaaaggacagattcttgtcattagtgtcagaaacatagaagaacctctgtgtccttccaccatatcagaatcacagaaaaacaaaaagttcatacattatgtgacttcactggcaacaatttgccagatattcttgctctctgtttaagctctggtagatgtaaagatggggtctcttattacagtcttaattaataaaattgagtctcagatcatacattaaacattatacaataaatgccatgctacatatgtagcttaaagaatgtctacaaagggttaaatacataaggggtttcaaggaatcctgagaagccaaagcttggaaactaacagtgatgcaaatggggacttagaaagatgggagactttttggaattgccaactgctgcatgtctcagatgatttgtagatttgagttccactgtgcaggtgaaagagacgggttgggtctataaaaagaaagaggtggagaggtacatgttggatcctcaggtcatgtcaaaggcaggaactgggcagagctgagatccctaagacaggcaggagatgcttgcctattggttcctggaggcacgcaaagggtagtgagtgacaaatgagtgtgggcaacagatattgtaatgctaggtattttttctttatacacccaggtgggggagttacacattttctgtgtctgttatgtccaataaattcttctgtctggtctccctgatatgatttaatacaccatgtgtccctacagtcccaatttaccccagtaaatttatagggttgcacactttttctcccaaacaaattattcattaatctgtactttgtgggtagtgatgaacagatgttgttattaacatagctacccagttatagagtcatcttttctcaaaaatgagtcatgctgatccatggctctccaccccggggcccagaagaggatacaggaatatgcccagtgcctgtaagcctgagtgggagacaaagatccacatgctggtctagggctctctgccttgggcctagaggaggaaacgtgggccttcctgatgccaaaaaacgctgggaggatggaatcttattatggtgagcaaatatgtgattgactatgaaagagagagagacagaatggttcatgtcctgcgaagagaggcaaagctgaaaagatgaaggcaatggtaattgggctgaggccagtggcctgcttgcgacttgaggccatgggggtatttgggccatgcttgtacctgaggcccttccacaactgtaatctgtgttcatttctgtggcagcattggtctatgttaatgtctatggcttctgtttccaccaaaggcctagagggtaggactgcacagaattggactcactcctcactagcatcgacactagggagaactggtcctactcctcactggctgtatcacaggagagaatgggtccctgcacatcaactgagctgcatgacagagctgactataggcaggggtgcgggaaagctggctctgagagtgtgagaggaggagacctggtcccaactccatctgccacgtgatagcatgggtaagggaaaaataccattcctccttctccccttgtcacctgcttcaggcaggagagctggcccagccccttaccacaagcagcaatagggagagctattgtacctcagtggcaacacagtggaatgatccttctggggatggcacaggcgagccagaccttaagatgtgagggtaagagggctaaccccactatttatatgtcatgaaacatcatgggctggcaaagatgctttccttgcccttcactgcctgcagcagacagaaaagcaggctcctgggtcatgagagtaggggagatggtcctcacctcactggctgggctggagtactcaagaacacaggcccttcaccttgcctgagcctcacagtagtgctgatatagcaggcagaggctcaggtgagcctgccctgaggtcacaagagggggacagttgaccccataacccttattcgccatgtacaggccacaataagagaaagatgctctcccttgccccctaactaaactgcagtggaccagagaactgaccctgccttaccagattcagcacttaggagagtagactctgtaccttgcctgagcaacacagtagagaagatgagccagccagaaaatggaagtgtgaaaaatctggttcatctcaacataaggtggcatggacaagggagagaaggctcccactccccacacagcctgtggcaggtgggagagctggctctgaggtcaccaaagcaagagagctgtccctgcctctcagcaagtgcagtactctgcagcgtggtccccactccttgtctgggcaacagtagagctgttcctggtagaaaataaaaataattatttgtttgtcttcaaaatgaaaatcctacaatttcagtgggaaaggtgcagattttacacaaattaatgcaaacttagggcagggtacagcctgatgtcaacaattctggttttgttttgaatttaagacaggattgtctgtatgtaaggctggcctggaactggtatttagcctaagattactttgaattcttggtctccccagtctctacccttaaatgtcagagccttatgtttgtatcatgctagggctcaagccaatgcttgtgcattcagcttcatcattcacctactgagttacatccccagacccagtggacagatcctgtacagaacagacacattgttcagtatggatgaggagttaaatggaaaatgtagtctatccaggtttttgttttcacctcttttggttgtatttgtgacattttccttttaaatggagaacaagcaaactagagatacagaattctaaacctggaattcatctgcttaccaggaaaccaaggactataaaatttctctaaaagtacttagtgaacctagtatcttattgtaaaatacgagaaggaactgtaatgtctccttgttcttctttattatatgacataagttagaacaaggactgcattgctgactcagctcccctcatagctaatctgtgacatcttcttatgctttattcctgactctgcctaagacatcaccacaagtcttaaaagctccaacggtctcctgaaatccatcagttcacaaagtgttattcatgcagagaaagattgggagacacatcctcatgatcttcaacacaaaattatttcatcaaccaggagacaatgacatcactcatcttgtcaataaagagcacagctgtactaccctgcttctgccatcctagtgattcaactgagtagtgatcttccaggaaataacaaaaaaatataaaatttattaaattggaaaaaatacatttaagtaaccatatttgtttacttgtcttcctcccactttctatgtgaatcacactatgtttagaagctctataaaatggcatctcatcttccctaatacttgcataacataaatctactttcatttcttacattacttgtttttcacagactgtaagtttacatattgactggatgtatagctagtggcctttaaacatcttctataaggatgcatatttaagaaatatttagcctaattaaaatcacacaaatggttcttacaaaaacctggtgttaaagcacatttacttcaatgggaagctgaaaggaaggaaggaggaaaggaagaaagaaagggtgtctttgcttgaaaagtagaggttttttttcttagaccattaaaaaatatcaaataggaaaaataaaaaccaacaagcaaacaagcaaaaatattggtttctattgagagtgactgtgttaatcacatacctctaattaggttgcaaatacttgtttacatattcaagctctcctcacacttctctgtgcatctaccacatagtatatgtccagtaccctaatctctgattttaaaataatgcctccctacccttagaaacatacttcacagcatgctatagaaagaagagtcaccatggtacaggagcattcaagtgtgctcatgcctgatctgtgagtataacctgaaaacttcttgatagaaaattcatgagaaatacattatgggcaagataagacaaaacaatatcacaggtattgatgggaaagcctgacaagctgccttttgattttcttaaaaataaaaatggtgaatagtcctcctagggaagggaccttaatttggttacccaataccaagttgtcagccttaaaatcacatatataaaagtaacattatgcatgctgagcagattatagttatgttatatttatagcatatataggtaggtaaatagatgacagacgcaaagatacatagatatctctgaatataaattaatatgcatacatacctaaactattagaatacagtaaatataaatgtataaatacagaataacaattggataatgattaaagttaatgagtgagcctttggccaagggcatagtcctttcctaggtttgaaactaacagattctgactatacctcagaagcactctgagacagagcacatgccagcagatctgtggtctccagttcactccctccccacagacacaagaatgtaattccaaaggaaatcccaatgatctccccacaccccaatttcctgtctctggaggaatgcagtggccaaagcctgatcatatgatctgccttttgtctctgcctcttaccaatatatgttatcattgcttctttgctttgaattccagggcgggagtcacctgctacctattgctaaaattaaatttaaagaccaagtacaaagttatgaaaatatacatcctgcatgaaaattctatcagcaagtcaatcataattaaagagaatgttatgtgatgctgatggctatttgagaatttaattttttgtagaattctgaagagcctttgaaaattaaatctatcttcatatcctcactgcttcatttgagccatttcttaacaggtgtgttctcagggaacacagactaattgtattttggccagacataattaagactctttgcacaccccaaatatataatgcattcttaattgattttggattatccatgccactgattttcccttgagtagacaacagaggggtaagtttatgcactagcatggggataggaatgagtattgagcatgtagacacaggctcaattatggcagatactgacttttctctttagattgctgaatatgcacaggtttgccctttgccctacctttggcagctcctactacttaaaaaacaaaaagatcacagtgtgatcaggactcagccttggaaataagacttgtactttataccatttgcttccttgtctgcctatgttaccctggaagaagtgtgtctgcaaagcactcagacattcacaactaagggccacatgccagagacctatgtatgttgcccaaataatagcctacatatgcatgctggatgtggaaggaacactgtcagacagaggaggctctagcactaatgttcctccttaggcaatgcttttttatatactttaatgagagagagagagagagagagagagagagagagagagagagaaacaccagcactatcattgctggaaatagaattcctgttcccaggatttgtgtcaagcacctttacctcccaagccacgccatttgtcccagatgatatcttaaccacagtccatgaacagttctgtgttatggaatttcccacccagttccacagctgcctgggagcccccaaataaacacagaagagttaaattaattataaagctgttggctgttggctgttggcttgggtttcttatcggttagttctgtcttaattattaacccatttctattaatatatgtattcccatatggtcttgacttacaagggaatgccagacttacaactcctttgcctgctgcatgatgactgctcagcatctttgcagagaagagagcaatttcctgtttgtccttgcttatatgctgattctacacagctacatcactttctatctagccaatcagccaatcggtgttttactcattaaccaataagaaaaacatacatgcaaaagaatattccccatcagttctgaacccaaatcaccacactaattcattgtggaaaccctaacccttaagcaaaggcattacaattgctttcattcatgagctaagaatcaggacacaacttgtgtacttttgcttgggacaactcccaaatacctgtgatgtggagcacagtggggtatcactgacaacacaggggtgatacttgcctgtctcctcctggctgccttttgctatttccagagttcatcttcagacaaatctttagagttttatgctattgtatttctctctgttgtgccatttaaatgaaacaggttatgtgaataacaccccccacacataaacacactcaccataaacatattctagtggcatttggctacctgtggattatttcagcctccacattcccaaaacaagtttaatatttggaatgttatgtctatccttatttctatgtagggttagataacaaccataaaaacaggaacagttgagtggatggaaggagaacctactctgctcaatccaaatattctttcagacagagacactgagacatcacattttcttcagagtaccctttcatgtggccttgaagaccagaaataaatcagttaaagaagtaggaacttcttcccaggtccaggaaaaacaagaagtgggttcaattcatggctattttggtgacaacatcttgatcagatgactggaattttctgtgtggttccactttaggtattttttccccaactttttttatttgaattagaaacaggattgttttacatgaaaatcccagttcccttctcccacttgtcctccctaccatcccccccccaactaaaaccctatctatcacatatcctttctgcccctgatggatggtgggaccttaaataaggtgtcatcagtgtctattgtatcctttgggatagggcctaggcccaacccagtgtgtcttggctcagggagtattcctttatatggaatgggctcccaaagcccacacctatgctagggataagtactgaacttctacaggaggtcccatagatttctgaggtatcctcacagaaacctaagttccagggatctggatcagtcccatgctggtattccagctatcagtctggggagcaagagttccgagatgttcagatcagctgtttctgtgggtttcaccagcctggtctggaccactgtgctcttcactcatacttctctgcatctgggttccagttcagttcggtgattagttgtgggtatatgcttctacttccaccaactgctggaggaaggctataggatggcatataagtcagtcatcaatctcataatcatgggagggcatttaagttagcctttcctccgttgctgagatagttagctggtgtcatctttgtagctctccagacatttccctagtgcctgatttctctgtcaaccagaaatgtctccctctattatgatatctccattcttgtcatcatctattcttcccctgactcagactttctgctccctcatgtcttatgcatccctcttattctccccttatcattctcctagctccctgccccctcttcctgggttcccaatttgctcagcagatcttgaccctctccccttctccaggggacaatgtatgtttctcttagtgtcctccttatttattagcttctttgtcagtgtggattgtaggctggtaatccttattctatatctaaaatctgcatatgagtgagcccataccatgtttgtctttttgagattgggttacttcggtcagaatggtttcttctagatccatccattttcctgcaaatttcaagatttcattgttttttttccactgagtagtactccattgtgtaaatgtaacacattttctttatccattcttcggttgaggggcatctaggctgcttgcattttctggctattataaatagtgctgctatgaacttggatgaacaaatgtcctggttgcatgaatgtgctttttttgggtacatgcctaagagtggaattgctggatcttgtggtaaactgattcccatttttttgagtggccatactgatttccaaagaggctgtacaagttggcactcccaccagcagtggagaagtgttcccctttctccacatcctctccaacatgaactgtcattggtgtttttgatattggccgttctgacaggagtaagatggtatctcagaattgttttgatttgcatttccctgatggctaaggatgtgaacactttctcatgtgtctttcagccctttttagattcctctattgagaattgtctatttagttctgtaccccactttttaattggattttttggtgtttgggggactagcttctatgtatattttggagatcaggcctctgtcagatgtggagttggtgaatatcttttcccaatgtgtgggctgcccttttgtcttgctgattgtctcctttgccttacagaagcttctcagtttcaggaggtcccatttatcaattgttgacctcagtgtctgtgctactggtgtaatgttcaggaagctggctcctgaaccaattaattaaagggtatttcccaattgtcttctaataggttcagtgtagctggatttatgttgaaatatttgatccattttgactaagttttgtgcaaggcgataggcttgtgtctaactgcagtcttctacatgtctacaaccagttatgccagcaccatttgttgaagatgctctctttgttccatcgtataaatttggattgcttatcaaaaatctggtgttcataggtgtgtgggttaatatcagggttttcaactctatcccattggcctaccagtctatttttctgccaataccaagctgttttcaggactatagctctgtaatagagcttgaagtcagggatggtgatgcttccagaagttcctctattgtacagggatgttttggctatcctgggtcttttgtttctccgtataggtattttaaatgaaaatgactgtgtttacttaatcaaaggtatacttacaaatctaactttagtctagatgacaccttcattaaatgtcataaatcagacactcatcgaataatatttatactgagaaaataagttcaattctcagtttatcaatttcttctcctattcacttcccaacagtctgtccatctcagtggtagccacagacacagccgtctcctagagtcatgagatacaggactcagctttccctgaatgaaaacctcagaaagtaatggtttggtttagattctttgaggaagaacagttacacttccaccttgcagacacaggtaatgagagttgaaaacaagtgcagggctcccaaagaagctgaaagcaattacagcacagaaggaggaaggaaggctagcaatactgcatttctctgctctttgttcagatgttaaactgatggatgtggaactgtggtcattttcacagcaggtctcccttgccagtaattcccctgttaaggaatccatgagtcaacttaatggaaggaggtcgagtctgtaattttattaaatgccagcaccctctctcctgagtacactctatgacacatttaaactgactgagacttccttcccttccattctctcccatattggcccctagttaattttactgctgtttactctttcactagtcaattaccataagatctataatcattttatgcttctctcagctcctaatgaatgtaatattcagaaatcaaaagtctcataaaagacaaagaattttgctacttggcctgcactgaaatttcatttaatagcattgtcatgagggggtgaagtatgcttttccttattagcaaaatcacagtgtttgaacccaccttctgtcgccaaccctcctttgctcctgtgaaatgttaataatgaagttaaatccagcctgcctgactgttagcactttttccctttcactcacaaaatgcataatactaatgctgattgcctaactgactccattattagataaccccaaaatgtcaaatgggactgtttaaattaggtgagcgaagccacatgaccagatccacacaggaaaactgtgaaccattacaaaatcagtaaaaagaagaaaaggaacttagagaaatttagcagtttgaaattaataatcgagttttagctcctgtattcatctcctttaaaagaagtattttccacttcatttccacttgagcactgcaatccagtatattcagaaggaccaattaaactctcttgacaccatgacctttcctgagttgggtcatgacactgtgggcaattagttggtccaatgtaggtcattgccagcagaagcagctgcgtctgttttccagtagagctagcctgtgctcaaggctaatccctaataagacttggctgaaagttatctgtggttatctttaaatcctcacaaagcaactgtccttctttattgacctcatttggaatcaaggttagctctgcattttttctgctcatttatggttgaggcaacactcatttaaagagatcttaagactaacactaaacttatgagaattttctcaagatagtaaaatgtcttagagaaagaaaataccattcacttgaaagtataagtttgcatgagccatgttctatttcaggtggttctaaaaatgcaggcattgaatgcagcccagctaataatagaaagtaaattagaaaaggtggcctcaggagtttagtgaatgtgcagttctgagtaagtgaaaattttgcccaatataatcatctaaacaatagaatgtgctaaaatggaaagcagataaaatggcaagataaaaatgtgggttcaaacaaccatacattttccaagggatcatcacaggtatcatctgtcaattggccaggtttccaagtcctgaacatccttttgcagtcatcaaattaggggtagtttagattcattgggtgtaagttgctaacttctccaaaaacttcaaggttcgtgttgaggtcatgatggtgaaggacttcaatccagtgtcagcctgtctgtgaagtcttctagatgctcactcagagttgttaattccatttcttcaaacctcttcatacaatcattatattctgagtttgtagtcattgatagacctaccggcattctttaagtagagcaagtaaatatttatttcagaccctgtttccataccaagcacttattaaacacatcaaaaacctaacacatacacacaaacacacacacacacacacacacacacacacacacacacacacacacacacacacacacacacacacactaacttacacacaattatgggacatgggtaacttgtttttccttttaagtaggcaagtttattaaagaatgaacttgtgtggcaatgtagtaatctatatatacatgggactgccacaagaaaggtgcaaattttatctcatggccaagatgtgatacagaagaaaaatactccatatgtgaccttcttccccttaaatgaatgctacaaacatatgaatatgaatacttatttccatttgatgtaaagataactccctggagagctttctgtgtagttcttattgtcaaacggttataaatgaggctgctacagctggccactttgtgaggtttttgccttcatgttagaatattctctcctggaaggaacagaaagacctatgaggctgaggaaacagacaaggaaattctgagaatcaactcagtacactatgactcctgagggctctacctgagttctcacaaatgctaaacaactcttggcttgcaactgcctacaggttacacagggaactccaacaaggggttttcctgagctattacctgtgctggaatgtgctttatgatgatgaggttgtccatgtcacctcaaatttactcactgatttaacaggctggacttggttggaatgagttttgaagtctatggatacccaatccaaggtgagcagatatgtcaataaattgcaccaagaaagtaatgccagaagtgtaaactatttcacacattctacttaatatttatattgcaaatgattcaagatagagggcagtgatagaacatcataaagcattacatctctctctgacttgaaatagaatgcaaaggctaaattttaggtccctaaacaagacatgaagagataacttttgaatagcaaatccaaaggaataaaggtgttgacttgatccatagccctgtctcatttcacatgtgttgctatagatctttcacctaacaaacagcatactgttctgagttactagaacttcaagtcattctattccatgaataaaatggcttatagtcaagaatccatagaaacctctctggggaaatcagacaagatcctagctagaagaaaaagtaatacatttatgatgcaggaaagaataaacacatctgatgatggaccagatgaggtttgtaccaagacagcaaccatcagcatatagtgaattagagaaatatgatatgggtcacttataaatgaaaagttgacctcacaaaaacttctcaataaatgccctgttggtcaatagagatccatctcctctattaaattggaaagtggtagaaattttttttatatttttctttttatttattcttctctcatacatctagactgaagtttcccctccttccactcctcaaagtacaaccacacctcacttctcccctagatccattgtacctctgtttcccttcagaatacagaagtcctctctgggatatcaagagaacacagcataaacaataagaataggcacaaaccctcattcatatctgtgttagtcaacacagtagaaggaaaacagtctcaagaacaggcaaaagagtcaaggagccctaaacatgctcactgttaggaatcacacaaacaaccttgacatatatgtagaggacttatcacaaacacatgtaggctctgtgattgccactttagtctctgtgtgcccctatgagctctgcttacttggttcagtgggaccttctgctgtcttcaagccttctggctcttgcaatcctttctctccttactattcttacaatccttctgaagggttccccaagctctgcctaatgattggcttcttatctttgcatctgctctcatcagctgccagatgaacctctctgatgacaattaggctagccaccaatctacaagtagagcagaatatcattaggaaccatttcattgacttctttttcttttttattaattcttttctatcctatatctctgggcctccagttcctgatcattcagacagtgctggcatgggctccctcttgtggcatgggcctcaagttgaaacagtcattggttggttcatcccacaagctccgagtctcattgccccagcacatgttgcaggtaggacagatcacaggtcgaagattttgtggttgggttttgggccagtcctacaactagaagcttaacaaggttacagaagatggctgtttcaggttccatatccttcattactaggagtccttactcggttcaccttcatagttcaaggaagtttctactgcactaggtttccacattgctccccaaatgccccccccatttccagttgtctagtcctgaaatctctccctccatgcctccctccatcacctatctctccatgttgccatccacacatgcacagttcactcataaaatctgtttccacttctcagagggatccatgtatcctccctagagccctacttgttattagcctcactgggtctatggattgcagtgtgattgtcctttacttaacagctaatatctacttataagtgggtacatatcatgtttgtctttctgtgtctgggttgccttactcaggatgatgtttgctagttccatccatttttctgcaaatttcatgatgtcatttatttttaaagacctgggcaatactctattgtgtaaatataccacattttctttatccaatctttggttgagggaagtctaggttgtttccagtttctggctataatgaataaaattactatgaacatggctgagcaagtatacttgtcataggacagagcatcttttgggaatatgcccagcaatcatatagctgggtcccgagatacagcaaatcccaattttctgaggacccatcatattgatttgcatagtgactctacaagtttgcactcccatcagcaatggaggagtattacccttacttcatatcctcaccagcaagagctttcacttgtgttattgtcttagtcattctgacaggtataagatggaatctcagagtacttttgatttatatttcactgatggttaaagatgctgaacatatttttgtaatttattttttatttaaattaaaaacaagcttctttcacatgtcaatctcagttccctctcccacccctcatcctctgcccctccaccaaccaacccccctatcgcaacccctattgcaccccagaaagggtgaggccttccatggggaaactttaaagtctgtgtatcaattggagcagagcctaggccttccccagtgtgtctagtctgaaagaacttccctcagtgtggagagggtgcccaagttccatttgtgtactaggggtaaatactgatccactatcagtggccccatagattgtccagaactccaaactgacttcctccttcaggggttctggaacagtcctatgctggtttcccagctatcagtctggggttcataaacaaccccttgttcaggtcagcagtttctgtgggtttctccaggctggtcttgacccctttgctcatgactcctccctctctgcaactggattccagagttcagctgtgtgggtgtctgctttcatcagctaccagataaagtcactaggatggcatcaaaaacaccaatgacagtttatgctggagaggatgtggagaaggggaacactcctcaactgctggtgggagtgccaactggtacagccactttggaattcagtatagcagtttctcaggaaaatgggaatcagtctaccacaagatccagcaattccactcttaggcatagaaccaaaagatgcacattcatacaataagaacatctgttcaaccatgttcatagcagcattatttgtaatagccagaaactggaagcaacctagatgcccttcaactgaggaatggatggagaaaacgtggtacatttatacaatggagtactactcagaagaaaaaaaaaactggaatcttggaattctcaggcaaatggatggaactagaagaaaccatcctgagtgaggtaaccccgtcacagaaagacaaaatggtgtgtactcactcatatggattttaaacagggagcaggggattgccatgctaaaatatacaccgacagagaagttaggaaacaaggaggaccctaagagagacacacatagtatgctgtagatggggaaaaggacaagatctcctatgttattggggatcatggggggacgggagagggagttagaagaaagaaaagggcagaaggggaggggagaggaggacatgagggagcaggaagatctagtcaggggaggaatggaggagagcaagaaaagggatacttttactctatgtctaaaattcacatatgagtgagtacataaaatgtctgtcttttttgtgactgggttacctcactcagaatggtttcttctagttccatccaattgcctgtgaatttcaagattccattgcctttttttctgctgagtagtactccattgggtaaatataccacattttctctatctattcttcagttgagggccatttagtttgtttccaggttctggctaaaacaaataatgccactatgaacatagttgaacagatgcccttgtaggaatttgcttcttttgggtatatgcctaagagtgaaattgctggatcttgtagactgattatcgtttttcctgaggagtcaccatactgattgccaaagtggatgtatgagttggcactcccacaagcagtggatgagtgttcccctttatgcacaacctctccagcataaactgtcattggtgtttttgattttagccattctgacaggaataagatggtatctcagagttgttttgatttgcattttcctgatggctaaggatgtcgaacactttcttatgtgtctttcagccattttagatcctataccccacttttcaattggattatttggtgttttggagactagcttcttgagttcttggtaaattttggagatcagccctctgtcacatgtggggttggtgaataatatttcccaatccatgaggtgtcaacttgggggttgccagtctgcagtccaggctgctggagagtctggtaaacaaggagaaccctaaaagagacatacatggtcccctggagaaggggaaagggacaagatctcctgagcaaatttggagaatgggaaggggagaaggaactaggaaatgagaaggggcgaagaggaggggtgaggaagacatgatgggatagggagattgagttgggggaagaagagaaaagagaaagataatagataatagtatagaggggacattataagttcaaagagaaatcaggcactaaggaaatgtttggagagctacaaagatgacaacaactaacaatctaagctatagtgggaaattaccaatatggagtcaagtagaaatataagggtatttattagggaaaagccttacttacagagcaacctagccagccagcatggcagcagtctgtcaagcaagtaccaaagtgaaaccaaaagagaaacgcaacatcacccattctacatcaccctgaccacgccctctaaggcgttgtcagacacacctgtagccaacccctaagtaggcatggctgcaggtttccctaaattccccttttagtctaaaagaggattaagacttaacagtgtaaagtatccaaaattaacaatcataaaggtgaaatataagaagatacaacaatctgcttatatcacctcctatctattttaactaaatcctaaagtcatctgaaagaggtgtccaagcctgaacnnnnnnnnnnnnnnnnnnnnnnnnnnnnnnnnnnnnnnnnnnnnnnnnnnnnnnnnnnnnnnnnnnnnnnnnnnnnnnnnnnnnnnnnnnnnnnnnnnnnnnnnnnnnnnnnnnnnnnnnnnnnnnctgaaatgggatgacaatagtcatgtggggccctgtaggaagaaaatgttagtgtagtaaaagtcttgaatgattgtatccagtccatgttagatgggactctcttgatagaagatctcgcttgaaatcctcaacttgattgaagtcagtacctgaagctttggactgagtgtcagttgaaatggagcaagttggatccagtgcagttgaggaggtgtggcccattttctttccagggtgtcaagggattgctgtcaggcaggtcttcattggctgtgtgggacacaaacataaacagcagagaaatgtttggttgtgtagatacacatgctggggaatgcaaccatgagagtgtaacaattatgagagggtgtacaccttgagagaaagatccaagaaaagacaaagacagtccccaaattcttcttttaatttgtattacatcaattggcttcttgatacaacacagaaacactaaggtttagttaaataatgtgcttggattttagaggaggaaagccaaatctacctctaaacccagcattggtttaattgaatagggactaggaaatgaagagcaatagagttctctgagagacagctgtaaagtttactgtatggcatgttccttttgtttggcggttataactaccttctcttcttaagtatctacccatgcagtatcctttgacttctggagatgagttttcctgtgaagataaaagcaaaacacttccctctcctttgggaggtttctttttagtttatgagatatactttagtagaatacctgtcatttctcctcgtcaagaggtttttccttttccactcaaatcttgatcaacttcaatggtatccaaagtttttcttctcctgtagaaaccaatgcaaaactcctactccaacgtaacacatgtcctggtttccatacagaggttagtacatctttgacgtataccagctgattgagttcggcagtttttcccatagtccagtgtctttctgcagctgtttgtcctttctcattggcattaagaaagtttagtgttaataaagcattatgcaacctatgtttggggggtttagtcttccaagcttgtttgttgagcatctccttaagtgttctattagatcgctcaaccactgcttgtcctgtaggattgtgtggtataccagtaacatgctttatgttataatatttgaaaaattgttccaatttcgtagagacatatgctggagcattgtcagtttttatttgtgcaggtatacccataactgccatcacctctagcaggtgtataataacagaatcagctttttcagagttaagagcagtagcccattggaaccctgagaatgtgtctatggtatgatgcacatatttcaaatttccaaactctgcaaagtgaaagacatccatctgccaaacctcatttctccgaatgcccttaggattacaacctgctggcaatggagtttgattataaaaggaacaagtaggacagttttttactgtcaccttggcttgttgccaagtaatggagaagtcctttttcaaacctttgctatttacatgatgtttcttatgaaattctgaggcttctagcacacttccaattaataaacaatcaatctcatcattttcttgggctagtgggcctggcagacccgtatgggatctgatatgtgtaatatatataggattacttctgtttctgatagtttcctgtaattgtaaaaacagagaagttaattctgtattatcaggaacaaattctgcagtctcaatatgtaacacgactctctctgcatactgagaatcagtaactatattaagaggttctgtaaaatccttaagtaccatgagaattgcatataattctgccttctgtacagatgtatatggactttgaactactttacttacctcacctgctttataacctgccttacctgatttgttggtatcagtgtagaaggtaagaactccagaaatagtttgtcttacaatacatggaagagtccagactgtgttttttatgaatttaattctgttagttttgggatagttgttgctaattgatcccaaaaagtcagtaagagctatttgccaatattcattatctttctacaaggaggaaatttcttcattagttacaggtactataaattctgctggatcttttccagtcagttgacgaagtctttttccagtcagctggcgaagtcttaatttaccctttaaaatcaaatcagaaatcttttctatatatgtctttaactttttattctgtttatgtggcagaaatatccattccaatatagtgtcttccctctgcatcagaattccagaagggtattctctggatggcaagataaccagaatacagtctaaattaaggtttatccgatctacatgtgcattcaatattctgttttctacccattgtaactctttttctgcctcatcagataatattttcggactgtttcggtccttatcacctttaagggccatttttaaatgctttaagtcatgtccttctacaccaataatagtctgtaattgagaaatttcccctaataatttctgaagagaattaagagtttgataacgatctctcctaatttataccttttgaggtctgattctctgtaagtgaatcttgtaacctaaatagttaatagaatctcctctgtgtgtcttttctggggcaatctgtaatccccaatgaggcagaacttccttcaccttttcaaacatattccaaagtttccttattagaatctgataaaagaatatcatccatgtaatgataaacaagagattgtgaaaatttcttatgaatcatttcccaaggttgctgtacaaaatgctgacacaaagtaggactatttagcattccttgttgcaaaactctccactgacatctcctaactcgctgggaattattaagagttggtacagtaaatgcaaatttttctctatcattttcctgtaacggtattgtgaaaaaacagtcttttagatcaatgactgtgataggccatcccttaggttataaggaaggaaatggcattccaggttgcagagagcccattggttgaattatcttatttatggctctcaggtctgtcagcattctccactttcctgacttcttttttataacaaatacgtcagagtgtgagaattccaaggactggtagattcctctatatgtccagcatctagctgttcctttactaacttttctaaagcctctatcttctcagaggtcataggccattgtcctccccaaactggttcatctgtaagccacttcaatggcattgcctttggctcctctgaagatccatcatttgtacctagtttctgtacagcatggatggttggtaaacgttttccatagcgtcttaccacatcttttctactatctaaagtttgtaaataatttgtatctgacactggagaaatattaatctgagtattccattgctgtaagagatcacgaccccagagatttataggtatatctgccacgtatggtttcagtatccatttctgtccttctggtccaattcagaccaccgagttaacagtctgtcgaactctagatagagttgcaattcctaaaaattgtacttttgcctctctaagaggccatttctgaggccaagatttttaggaataatagttatatccaccccagtgtctactaagccagaaataactttattattaattttcactttcaactgtggccttttatcattaatagaagcttgccaaaatatgcgtttctcattttgtccattcatacttgattcttcatcactattcaaactatcatcaagagcagtatcattttttaaattaggcaaagaactatctattggtcctgtgagaaattgtctcccactgctactgggaatgatccaacatttctctatgtggggggcttcttgagtccccccatcggggtttcccgaccttaatgagtttcctcgaatgtccctagttgatctactttcattggtccactgtctgcccttaccacatcttctaaacaatccagaaggcagtggccttccatatgaggcattgttagaattcatttgtctacaatttctcttagtatatcccatttaccacagttcaaacttgtaggttcctggagcctttgtggtctccaggggaaggctcttcctacccaaggttctggttcatagtagtagtaaactctagcctcttggtaactatgttgacctctgtaagttgcttctccttgccaatcccttacatcctcaccttctgaacttttaatttcctgttgccattttaaaagtttggagatggcttctcctacccaagctccagtatcttgcacattatagtcaatgttggctgcatacaaacccattcttctagcagagctgatctgatctttaaaggcaaaagtattcttttgcatnnnnnnnnnnnnnnnnnnnnnnnnnnnnnnnnnnnnnnnnnnnnnnnnnnnnnnnnnnnnnnnnnnnnnnnnnnnnnnnnnnnnnnnnnnnnnnnnnnnnnnnnnnnnnnnnnnnnnnnnnnnnnnnnnnnnnnnnnnnnnnnnnnnnnnnnnnnnnnnnnnnnnnnnnnnnnnnnnnnnnnnnnnnnnnnnnnnnnnnnnnnnnnnnnnnnnnnnnnnnnnnnnnnnnnnnnnnnnnnnnnnnnnnnnnnnnnnnnnnnnnnataaataccctgaccaagaagcttatctagagaggcttcaaaaccttcctttatgccctgatgatcaaggagctttgcctcttcccttactaatgccttccactggatttggcatgaattctcaagtacagctgctaccaatcattcccaatctgtgggtgtcaccctgttaaaggttgcccatgaatgcaatagctgttttatgtatgggctatggagaccatatgagacaactgattctttaatattcttaagatccttcagctgtataagttgccattcataagccatctgtccatgagggtgtttcttagaagctggcttatctaccatgctagctggtacactaatgatgtatgagtaacaaccttagaagaatagtcacgatacctgggtggagtaggtgccttggattggagtgattctgcttctgaggcatcccaatgatctttaatcctaataatgttattcttttgaaaaaattcaatctccttaatcataaaagattccaagcacgttagtgaatctgtaaattgctctaactgcacatctacatgtttttctaggtctttaacacaatcatccttaagcagcatctggatggcatggaaactgccttctaggtatnnnnnnnnnnnngattccaggtcatgatttgctgattttgagtcctcagcaattgaccgtatggacctatgtaatctgtcagccctgtagtgtaaattatcttccaaacattcaaatctagactcaaatttgtgatctgctaccttggatgcttcaataattgattgaatggcattgtccaattcttcaaccctatcctggatattttgcaccgttgcatctaatttctgggtaacattgcctatctgaatttctagctcgctacagatattctttagctcctcatggtcttctgacagcctagcctctaaggcctcagacttggaggatctctctgtgattatctgatcataaatatgctgcatctcatcagacagctctgtctttagcatattggacacagagccaagcttatcatccaatttctgttccacttgctgcacaattgtggtctgacctaatctgttctccaaaacctcactgcgtaaagctgttttttcctgtaagtaggtggtaaggttatccttatccctattcctgagtcctctggctagtaacattatttgtaccaggaagctaaatgccattactgtatataggctggtaattggcagattagcatcctcctcaaacagtgaattcaaataataagcaaaattattaccaattttaacaaatgataaatattctgcataattttacctgatttctactccagatgcagtaaatatatttgaccagcacaggcgttcagttattccaaggcgtttggcagcagtcagtcagcggtggagagaggtcataaaagtgctgtgcttatcttagagagtatacggtcttgtggccgcaaccactgaaacagatgcagctttaccgcagcagcagccaagggaagcctctgctgaaagccgaggcctactcacctctaggcagctagaaactgtctctgagctgggtggatggttctgagcagctcagctgcagagggtcggctgctagccatgagcacctgcagagagagggcgctttctgggcctaggctgcaggcctggtagaacccacagcctgtcccaaatgggatgtagatttccaatatcccactcctgacaccggatatagtgggaaattaccatacggagtcaggtagaaatataagggtatttaatagggaaaagccttatttacagagcgacctagccagctggcgtggcagcagtctgtccagcaagtaccaaagtgaaaccgaaagagaaattcaagtcacccagtctacatcaccctgaccatgccctggaaggcattgtcagacacacctgtagccagcccctaagtagatgtggcttcgagttcccctacacttggtcttaatttcattggaattgctttaggtttctcttcatttaatttgatgttggcaatatgattgctgtaaattgcctttattatgctgaagtatgtccctcttatctatccctgatctctccaagaatttcactctaaaggagtgtttgattttgtcaatggctttttcagcatctaatgagatgatcaagtaggtttttaaatttcagtttgtttatattatggtctacattgactgattttcatatgttgaattatcattgtatctctggaatgcaggctatttgatcatggtgggtgatcttttgagtgtattctttatgtttacaagtattttgttgagtatttctgcatgtatgttcataatggaaattgccctgcaattctttctttgttgaatctttgtgtcagtcatgtatcagagtgattatggcctcataaaatgaattatgcagtgctccttctgtcatcattttgttcgatattaaaatgcctacaccagcctattttataggtccatttgcctagaaaacctttttctgagcctttattctcaggtaatgtctgtctttggtgttgagttatgtttcttgtatgcagcataaggatggatgctgcttttgaattcattatgttagtctgtttcttttagttgagaagttgagtccattgatattgagagataaatgattgctatttcctgttaatcattgttgtcattggtggttttatgtcattggtgggatgatggtgttagtagcagtggtaatggttgagaggttgtcgttccctttggttttgcttttatgagattattccccgtgttttcaaagctatatttaacttccttgagttggagttttctttctactatcctcactaggactggatttatgaatagattttatttaaatttgactttatcatggaatatattttttctccatctttgttaatgaaacttttgaagcatatagtagcatggaatgctgtcatagaattaacagaatatctgtctagattcttctggcttttagagtctccattgagaagatgatgtaattctattaggtctatatttatatgttacttgttcttgttatattgcagctttcaatacgctttctttattctgaatgtttagtgttttattatgttgcatggggacttttctggtccaatatatttgttgtcctgtaagcttcttatacttttccagacatctccttatttagattaggaaaattttcttctgatttgttgaaaacgttttcttggcctttgtgctagaattagtttctgccttctattcctattattcttagatttggtgttttcatagactcccagatttttatttaacattttctttgatcaatatatctatttcttctattgtatctcaagtgcctcctattatcctattctctcttccatttcttgtattctgttagtaaagcttgcctctgtagttcctgttcacttacatatatatttcgttaccagaattccctcagcttgtgctttctttgttgcttctatgtccatttcaggtcttgagctgttttattcaggaatttttttctaatgtaaagaaaatgtagttatttggaggacttaggccagcatggaaattttaaagacatttctggcacagccgtatctgatgagaatggcaaaagtcacaaagccagcacagctgtttgacaaatatccaataaaggtgggcaacatgatggctgccatacatactttggttttcatctccacctgtgtcatacttgggatacttttaatatttgtacaatttggggatagtggattgatgaaaaatttcttaggaatcagttaagccttctccaaggtatactgcttctaagcttctccagtaacctcctgaacatactaccccttccacttttagggagatattcatatctacttggtcttccttatacattggagattgcaatacacataaataagccagaagtctctttatgaggttatgagatattatcgaaagatctgtccctgtacttactcaggaacaaaataatcaaaacaaattcagttcaaaaaggtcaacaagattttgagcactagaggaggaggccacagttcagattacaatcctcttcatactatacactcaagaaattatttggcatacacagcaacaaagttagattagctggttacctctatcatacacagagactcatattgatgggcaaagaatgataaaagaataaaatataagtacattcctttcttagaaaagttagaacatgcagcgccactgtggtgtcataagaccaaggaataacagaatgccaggattagacatatagacaaattccataaagatacaaaacacaaatattgtattacaccagaatttgaataataactgcagcagctttggcctgaggatttttcttgggcactctgactattaagagttagtaatacactgtaagggacatggcaatgtgcctagattagattggagattttgttttggcctaatgtccttatagccacaaaagctaccaaccaaattgggttatggggttgataagtaaaaatgattataaaagataactctgtttatcaatgataacaaaacttgaaggaaaattattggaaatgttaactctgttctgttatagtttattaatgatgactaaaagatgagcaatgaaacacatgtacaaaacaaaaatgacactatctatgttttggaacagtatgaatctatccatgcttactaaattctataaataaagaaccatactgactgctagtcagtcaggctgcaagattttcctgaccattgtgacctagcttatttctttccctcaccacctccttacatcctttgctgggatctgtccactgatggagatggctccccacacacttcttaagtgcacatttccaaattaactccttaacacaatattttaaggtacatgttagccaccccctctcttagagaagcctgcacacatgcagtcacatgtgtcctttattctcaacccttccttctctcctcatactcatgttgaaacctatctttgcaatgtcttactaaagaatcaactctgctttataaaaaagggccaaactgcaagaatggtcatgaaatttaactttttattatttaaaatccttaaatttaaatgtttctctatctacttttgccttcccaatgtttttcaaactcctctcctccttccaactaacctgattaaattctgtctcagaaaaacaaaaagaaaagaaaaaatccaatacaaaagcaactacccccggaaaaaaacaaggtaacaaaataaaattccactcaaaaattttaaaaagcaccaaattgttgccaaataaaaatgaacaaagtacttgtggagtcgattatatgttggtcaactactcctgaacatgccatgaggcctgccctggagtggttgatatacccagtgtcattctactggagaaaaccaattttctgtctctggcagatataagtgacagtgcagttgtgaacctttactcttgtggctaggttctcattaaaatacaatgcatttcaagttaataagataaagcaataattatcacataaaatttagacaagacaaaccaaagaaggaaaagactccaagaaaaggtacaagaattagagacctgtgcatttacatactcagtaatccaataacaatactaaacaagaagccataatataaggaaaggacctagtgcagacctgtgcaggccctatgtatgctgcttacatttttatgagttcatatgagctttgatcatgttgatttagaaatccttcgtttcatggtgtccttcatcccttctggttcttagacttttattttctcctcttctgcagaattccctgaactcggaggggagggaatttatagagacatcccatttaggtctgcaaggtccaaggtctctcactctctgcatagtgtttggctattggtctttatatttgttcctatttgctataggagaaagcttctctaatgatagttgaatgaggcacaaatctatgaatataataaaatatcattattttagcccagtattattgtactggttgtacccttgtaccctgggctatataatttcaggatcttggtcacccaagcaatatcaggtatgggttccatctcatggagtgagccttaagttaaatcagatgctgtttggttactcccacaaattttgtgccaacatttccctagcatattttatatgcnnnnnnnnnnggaaaagatttgtgtttgggttgatgtttatgtttctcttttggtgccatgcagagaacttcctgtaccaaagacactggaatataggagtatgggctctatgtaggaaacagcttgacatctccatgtttcctgagttgtctacgtgttatgttcagcaatgggtcttgctgttaattcgcggaaacaaacctatagtctttgcaaaaccatgggttctttgaggattcccattggatgcctctgactaagagcaaaattagatgtcaccccaaatagatttaaccaaatcagggtactgcgagcttcacttggtgacaagagatggccagttggggttctgtcccatacccccattattccccaatatttgcaaatttcattaagaccacattcaagagatttctactccattatgtttccatactacaccacaagtgctcctcaattttagctgactctccctgtatttcttcccacaaccccctcttcaacccctctcctcaaatgatcctaccattcaagcctcccttccatccatatctatctattgtatttccctttcacaagacctttgtgatctctttagtcccttactctatacctatcctctgaggctccatggcttataacttgattttcattgataatataacagataatatccacttttaagtgaatacataccatatatgtctttccagatctgagaaacttctttcagggtaattttttcctagttcggtccatttgcctgtaaacttcatgatgtgatttttaaatggctgtgtaatattctattgtgtaatttaccacatattctttggttcagagacatctaagatttttttttcaattcctggctcttatgactatagaagcaatgaatgtggctcattttcttgtcatggcagatgctgtgttgtagaatcaagaatcatttgtgtatatgtccaagagtggtatagctgggccttgaagtagatcaattcccaattttctgagaaacctctatattaatttccaaagtagctgtatagtttttcactccaaccaccagtgaaggagaattacccttgctccacatcttctttggcaccaactaccacttgtgtttttaatcttagccattctggcaggtataagatggaatctcattttagttttgatacacatttccctgatggctaaggatgcagagcatttctttctcagccacattattttttctcttttgagaattctctgtttaaatatagactccatttaaaaatatttaacaaatattaagatatttgtttccttgatatttagtttcttgagttctttatatattttagatattagaggtnnnnnnnnnnnnnnnnnnnnnnnnnnnnnnnnnnnnnnnnnnnnnnnnnnnnnnnnnnnnnnnnnnnnnnnnnnnnnnnnnnnnnnnnnnnnnnnnnnnnnnnnnnnnnnnnnnnnntggtatcctttgttatgcagaaaattctcagtttcacgaggttccaattattaattttgatcttagtgcctgtgctaatggtgttttgttcagaaaaatcttttcctgtgcaacgtgtacaagtgtatttaccacttttatcttctttcagattcagtttttatgattttatgttgatgtgtttggaccacttggagtatgaatctatttggatttttcaacatgcatgtatccagtttgaccagcaccatttgctaaaaaatgcctcctttttcattgtgtatttctgtaatcttcatcagaaatcaggagtcagtatgtgtgtgtaattatgtatgggtcttcaattatatttcattaatcaacatgtctgatttgtaccaatatcatgctggttttcttagtatgccttgatagtacaactccaagttggggatttgacacctccagcagttctcttattacttaggatttttaactatcctttttgtgtgttctttatatgtagctgataaccagccttttaagatatgtgaggtattgtattgggatagttatgaagattgcattgaatctgtagattagtttgagtgtaataaccttttttacaatcttaattctactgaaccttgagcatgagagagccttaaacttctgatatcatcttcaacttctttcttcaatgacttcaattttttcattcaagtatttggctttattagttagagatacccaaagatattttatattatttgagactattgtgaaagttgttgtttccttgacttctttctcagagtaattttttgagtttattttgtggctagctatttttctgaaagtttttatcagctgtgcaagtttcctggtggagtttttagggtcattattgtatacaattaatattgatctgcaaataatgaaattctgacttctttctaatttgtaacgccttgatctccttcacttgtcttattgctgtggctaagaattgaagtattatattgaatgggagtgggaatttgaatgtaattgtttcccttaagcttatagggaatggcataattaggaagtgtggctttgttggagtggatatggccttggtggagaaagtatgtcattgttaggggtggactttgaggtttcctaggctccagataccactaagtgccataattcacttcctattgccttctgatcaagatgtagccagcaccatgtcttcctccacactagcatgttccctgttttgctgaaaaggggctgtacctctgacctttaagtgagccaccctattaaatattttcctttataagtggttctgtcatcattctgtcttttcacagcagtggaaaccctaagacagaagttggtaccagggactaggatattgcctcgataagcctgaccacatttttgtttgaagaaatttggactgtggtactttaggttaggaaagtagtagaatttttaagcattgtttaaagaatgggtcatacttgtaggatcatgggagacagtgatgataagagttatttgatcaattggggattagctgaagaggtttcagagaagaattttagtatgttgcctatatcattcctgtaatatattgatgaagaatatggctgcctttgcccttttctgaagagtatgcttgaggctaaagcaaaaagttttgtattaattccattggcagggaaatatcagcagcctagtatagactccattaactaagatttatcatgaaaaggaacaagctgagcaaataaaattttaaaaaagtacagatagagaaaagtggcaccaggaaataaaatagagataaatcctgtgttcaagggtataaacagattaagaaatggaataaagggaatggtgacttcaggaaaagttcccacctagctaagtttccaacctgtgaaaggagactaaagaaaagattagagccaaataaggtggtgtgtacccttaatcccaacaccctgaaggcagaggctgacagatcttggcgtttgaggccagtatagcctagagatcccgttttagtaccaccaagcttaggcagggaaaaacagaaatctggtaaagatgtaactgaacgaggggaccatgttccagttccagcaaacagcagaagttggcagcttcagcaacgtggttctggaggtaaggatagcagaaaggggttatgcaattttcccgagactaaagaaaaccactgagaccgggcatgtgcaagcattctcagaaaatctgctaataggatttagaaccagccccagtggtaatagtgtgttgcagtcaacagaactgaagggagttgatgatctgaagagtattttgatgtttggttttgttttgttttgtttttcttcagacatggagatgcagagtttggaatttgcccagctgggtttggtctttttttttttttttttttttttttttttttttttttttttggtccaatatttcttcactattctcccttccatatatattggaatggtaatgtatttcctgtgccattacatgttggaagtatgtaatctgcctttttatttggattctatagggaattggagttagattacatgaatctcagaagagattttgaaatttaaacttttaaacattattgagactgtgatagactacggggacttttcaagttgaatgaaatgcattttgcatgatgttattgtcacaagcttatggaggccagggacttgaatgtggtagtttaaatgtaactggcccccacaggctcatatgtaccgacactattagtaggtttggccttggtgaaggaagtatgtcacagtgggggggtgggctttgagtttcctatgctcaggatacatactgcccagtgtctgagtttacttcctgttgtcttctaatcaagatgtaatcagtaccatgtatccctgcacaccatcaagctccctgccatggtgaaaatggacggaacctctgaaatgtaagcaagccacccaaattaaatgtttcctttataagagtttttatattgtcatattgtctcttcacagtaataggaactgaaagacaataggtatggaaagaatgggcaaccttgtcttagctctgaatttagtgagtttgttttgagtttctgttcatttaagttgatattggcatggactttcttttgtatgttggggtatgtcccttatatctgttatctttccatgacttttatcatgagtaggtaaagaattttgtcattagctttttatacatctaatgagatgatcatgttttcttttcttttaatttgcttatatggcagattacatttattgattttttttatatattgaaacatccctcctgaatctatgggatgaaatctacttgattatggtagacggctttttgtagatggtcttcaattcggtttaagtgtattttactgaacttttcccatctatatttgtaagggaaattggtctgcagttctctgtctttgttggatcagtatgtagtttgtgtatcagagtaactgtggcatcataaaattaatgagaactattcctttggtttctatttagtgaaataatttgaggagcactattcttatcttttctttgaaagtctggtagaattctgtgctaaaactgtctgaccctgggatttttgggggtgggtgacttttaatgattgcttcaatttcactaggaattataggactatttaaattgtttatctaatcttgatttaactttggcaagtgatatacattaagaaaattatcaatttcattaaaattttctaattttgtggagcacaagtttttaaagtatgtccttatgattctttagattttctgattgtctattgttaactccttttcatttctgtttgttagatattttccctgtgttttttttttttttttttaattttgataagagtttgtctaccttactggcttcctcaaagaacaaattcctggtttcattgattctttatattgtttgttttgtttcaattttatttgtttcatccctgagtttgaatatttcctgtcatctattccctttgggtgtgatttcttcttttgttctacagcttttaggtgtgctgttctaataatagtgtgatatatctctatttttttagtttacgtacatccttagtggtatgaatttacctctaagaacagccttcattgtgttccataaatttgggtatgttgtttattcattttctttgaattctagaaagtatttaatttccttcttaagttctgcttgacccatttttcatttagtacagacttttgtagtttccatgattttgtaagcttcctggtgtttctactgttttaatatccagcttttattgtgtaggtcagataggatacaagttgttattttgaacttcttttatctgttgagactttctttgtgtctgtgtatgtggccaagtttggagaaagttccagaaggtgctgagaaaagcacatattcttttgagtcttggtgaaatattctataagtatgttaggtccatttattttataacttcagttagcttcagaacttctctgtttagattttatctggatcagctctctattgccaagattggttggggtgttgaagtcacccatatcagtgtgtgagggtcaatatgtgatttaagctgtagcagtttcttttataaacatggatgcccttgtgtttggggcattgatgttaagaagtgaaatgtccttgagattttttgtctcttgagtatgtcatattcttccttatctcttctcattagttttggtttgaagtctattttgtcagatggtaaatccactacttcagtttgttcttagggctattttcttgaaatatctctttctaatactttaccctgatgggatatctgtccttcacattgatgtgagtttcttggatggaccctatttttgcccacattcaaatctgaaaaatttaaaaagtagttttctacatggcttactaagattttaaaaacacctccactctcaaaagaaaggaaaactttgtgctccttctcttttgatttttgagaaagtttgtttactgagccctatatataaaagaatatataaagcatatttattaaaaaagagtaatgaaaataaccagtaactatgcaaaaacagcaataacaacaaaaaaacaataattatgcaaaagagggcagtagcaggctaaatgtctcctgagaatctattgcaatctcagggacaccatgggggaaggagagaatcagattccataagttgtcctctagcattcatgaatacactcacacacacacacacacacaaacacacacaaaaacacacaacacacacacttaaaaaaaattgtatttaaaaacacacaaaacactaccatttgcaaggggcatccatccctaccacaaagaagaaactcagtactgtatttcttatgcaagtgattacgaatcacattgtgactatatgtgagtaacacacagcttttcttatgtgaaaattatattcccctctttattgttttgctactaaatcagcttgttacattacatatatttatatgtttattgtatctctggtacaatgcttgatttatttatgccactggaccatatcccattgtatagctatgcttatttttttcatataatttcttacaaatgaatatttttcttatggcattttttattttctaatctaggtcattataacttttttatacttctgaaatcttgtagtaaggagtgttttccattcagtattattctaattcctctaattactactgttttttaaaatgaatatatttgttattgatcatcaaacacagaagtgcttattcatggtttttctctatttaattgaaattattgggttttagctcacattggtataaagatgtatatcatatacaaatatgtaatggaaatacatatgaaaatcctactctgtgtacagataatccatatttggtgctgtaatgtgctaaagatattggaaattgattctgtctgactttattaccttctcaaggcttagtaattggaactattaaatgacattatcattaatatagcatcatttttactttttgtgtgtgtgtgtgtctgtgtatgtatgtttggtgtccatgtgtggttatacacacacatagaggtacccattgaggccagaagagggtgtggaaactcctggagctggagctggagttagaggtaggagtaagaatcctgctgtggtttctgggaacttaattctgatcttcaatgggagcaagagagatttatctactgaacaacctctccagactagtaaagtgtagtttatcagatactttatttatggtttatgttgtttgagttttattagtttcctgtcataatcgcgtaatgaaattcttgttactttgtaaaacttacagattgttggtattatatatttagtctcatctgcctgaaattggtacttttggtataaatcaacataagcaatttcactaatacattattaatggctttaattaataagctgccatatgcctccaaaatcactgatctgattgaatgtctcatagatccctcctgggataatatatcactttccttcatctttaacatgaacctaatctggtaaacaggctctaaatatttgtcaaatatgtgctgataatactttgacttttctgtaaaattctaagaactaatattgccctgatactctaagcatggctgggaagcattctagtcatagaacagtttttgcctgaggtggccaattttatggctgattggccatgttccgctttcttatctgttccctcagaagtgtctctaagcacccacagcctgcagttccttatcaatgatttcagctatctgatgacacctttttttaaatctgagactatttttagtccctttttttttagagaatagttagacttaacattcttataaccaaagttgtctttaagctttccagtattttcattttagattattttaatgctatatttctgttattttttgaagtaaaatatcaaggataaggcatgcatgaatttaaatatattggggtcaacctatatacaaataagagactgaagaggtagtttagtggttaggagactgtttggtatgctgaagccctcaggggattcaagcactaaagcaaaggaatgcacaaacaatagaagtcttttcactcaccggccttgtaattatggcaccaccatcaaaatatgtccatcatcctcagtgagacaagaagtctgtgagctaacccctccccataaggtgaagcttaattgcagggattccattgtgagaactcagaagcctgcttgtgctgaagtatgctacatatcctaagattctttcagccacaacattgctgttttgtgttgtataatgccaatgccccatgggttccgtctgcccactcgaagatactggggatatataagttcaaaatagaaaaagtcaggcaatgtgtatcatattagatatatacaacaattggtcacaggaaaaaccaagaggtattcactgtttttcacacctgaaattggagatttttgtatatttataatgcacagaagctgtgttttgaaaagcaaatattatccctctctgaatagagaaaattcatagcacagtactgccactgtgacagatgcttgtttatttactgaacctcaaaatgtcatcaccatcatttattttactttgcatttttattttactttctttatatttagtatgctttcattgctctattttcttgagatacttagaatatagaatttaataattatcttcactataaatacatatacctcaaacttattttcatagacaatttagtctatccacaaatcttaaaacaatgagcttgaataaattcacttacaaatactttttcaatttgattcttatttctttgaaatatgtgaaacatttaaaagtacattcatttataaatacatgggaattttaaaaaaatttattcagtcaaagagagggaggagggattatatgagcaaggggggcaagattatgatggggaagcccacagagacagctgatctgacatagggggaactcatggactctggactgacagctggagagcctgcatgagaaaaaactaggccttgtcattttgggtgacagttgggtgccttggtctgtttgtgggactcctgacagtggaaccaggatttatccctggtgcacaaattgtccttttagagactattcccaatgatgggttaccttgctctgccttgatgcaggaggtaagggaattgttgctgcctcaacttagtattccagccttagttgacttcctataggaggctgtaccctttctttggagtatatggggttggggaaagatggagggagaatgaggaagagagggatggggacttctggttggtatgtaaaatgaataaaacaattctttaaaagaccccatgaacatgggtgtcagtgaggaagccttgaaaatctacaggtcctcttatagtagatcagtacttatccctagtataggaatggactgtgggagcccattctacatagagagatactctctgagcctagatacatgggggagatcctaggccctatcccaaaggatatgacagactctgaagaccccctatggaaggcctcaccctccctggggagcagaaagggtatgggataggtagggtgtaagttgctgggagcaggaggaggagaggagggagaggtaactgagattgacatgtaaaacaatcttgtttctaatttaaaatttaaaaactggagaaaaaaacaaagaaaattcattgatttttaacttaaacatggctaccaaatatatcatcataacttaagtcttttatatttaattgagtcagattatatacaattatcccaatggaactgaaaataatgagatctttgcatttgaaggacatggagtcaaaggtagattagaccatgatgattattgactgtaacagtcaaatttgatgtcttgttacctttccttcttattttttccccagtgagtttgtgaaaggaagaaaaatttatgcaataattataggttagtgtaatcttttattttattttactttattggtttttcgagacagggtttctctgtgtagctttagagcctatcctggcacttgctctggagaccaggctggccttgaacgcacagagatctgcctgtctctgcctcccaagtgctgggattaaaggaatgtgccgaatgcccagctctaatcttttaattaggtatttttattttaaaatttctaagtctattttattaggtaaataaattgtgagctttcttgttgaacagaactcactatcatgaagtcttctttcttgcctgttgtagtcatgttctactgctctgaatatacatcatgaccatggcaactcttataaaggaaagtgtttaagtgtgactggattacagatttagaggtttagtccattatcatcatgacaggaagcttgaccacatgtaagaagacatggtagttgagaagtagcttagatttctacatccaaatcatcaggcagcaagaagaaagagactctgagactggcttgggcattgaaaactccaaaacccacgcacaaggccacacctacccaaggccacacctcctaatccctcttaagcagtgctactatttaacagccaagcatatgagtctatggcagccatccctatgcaagccaacccactgtctctccatctctagcactatatagacatagatatatagataaagatatagatatagatatagatatagatatagatatagacgtagatgtagatatagatatagatatagatttatgtactgtgcaactctctcatcctttgactttcaatatgttgattgcttagatgtgtctctcaatagccaagacataaatatttttcattgtattttctggatgtttctaaacactttgtacaatgaatatttttatatttattcctctcacttactaacaagttaacatgaggctcatgcatgtactaggtaatacattcctgaaatgtaatacattgtcatcacgtatgtttttatagctgtgcattttatttagtctttgatcaacttttatccttaagtaaacacatttgcctcattagttcattttgtgatttggcaattctctaatgtgtgccttctaatgttccccacagaacattagattcatcactatgtctctgtgtgtggtccaacagtaggagtggcttatagaaaacagcatagctctgaagaacaagatcctgaagcaaagttccacttttcacacttaacatttgtgtataattgggaagctcattgggtcccttcatatttcctccttcatttataaagtaggctatgcaatgatggtcacatttttatagtgttgcaagtaccaaacacactaatatataaaatgcattccaaatatgacctgacatatagcaacaatttcaagagtatccacataaaacaatgaagtgttaattttttgttgagatcttagctattcattcttttatgataggctacctccctgtcaggtccacaaatgagattttgaccaacacattctggaagcctctctgccttcatgctattccatcctttaatatactaccatattttttttacatatatggctaaactcttgatgtataaaacacaatttactatcacatcactgaaaagtaagtcctgaacatataagttgcaatatgatataactagacacagctactttgaaacatttgaattataattgatctaagttatactctccagaatagtctaaactttgaatgtttaattctaaaaaagaagaaaaatataaactgtcttactaatgcattttgggttggctccatgttaaaattatatttgagatttattgggataaatataattcttatgaattgtttcttttattttgttacatatctaccaagtaacttagaatgacatttgtggcttatgctgtagctctattgagtgttacaggcttgcaaaaattatggtatccaaatctataggttcttggaggccctaatatataatacacacttaattcattttatgttatagtaagtatttcttttacattgacattatgtcttcagagatcaattcttcaggacagcaaaggcaaattctctattttcgtttaattttttaattcctggtataccaaagcatagcaaatgctcattgtatttgccaagtaaaagtgataatacactgcattgtttcagtaaaataaacaacaagtttattttctagagatatctgactaaaatttgatagacacatgcaaaaagatcccctataaaattatagttcctgaattacaaatacaagtattaattggaacagaattctttgagtcttgctatagagatagtgagtttgatttcctaaaaatacatgatatatataatcaaaagacacaaaatactaagagtccttgaccatagttccagagactggtaacaactggtggccactgggacccaccctccccttcatcccctatttagtatataacagacttgatcgattggtagacacttaaaatagcatctgatcttttgtttgagataaagaatctgtgttcttttaatttgttctgaagcatgctattccctagcctttttgatcactatcagtgtaactcaatttaacaagccttctctgtctgtgaggagtgggctaagttcttcagaggacttcaatggagatgaacatctagcttccaaaagcttacaatggccacagggaaatgggcatatacatgagtcttggtgcagatcccaaaaagaactagagttttacagtactaaccatagaagcaacaggggttgaggtgaagggtgtccctgtacttgagggctgcattaataacagagccagatttaggggagatggatttccttcaagcaagttctctgtcctctgaagatgataagacaataatagttcacaagaaaggatatcaggaagtaagcacttcccaaagcatgtcgtcctgatgttaaacaccattcacatattttgaacaactgttacatgatagacactataagccaggtacagagatgtgatcatgataaaacacatcccatttacaaaggtgaaaattcagatgagaaataaatggaaatttgaagtgtcctgtaactagtataagccttaagagctaatatatgggaggttctttattggtgaacaggatctgggctgttatttccaggcttggtctcttactcaagtggaaacaaaggttctcacaagttggataattagtgacgaaacttaactcaaagcaaaactgtaataaaggtttggaagggataaagcatcaagattggcagtgggtcagaagaatgattataatcaagggcctcagttatcttctgtaacctcagtcaatgcagttcggagaaggaggaattttgttatcaggctctctaatttgattgccaggcctggattacctgagcttttgctcactgcccatgtcctttcccacggtgcatttcattgcaatcatatacatgttcttttataaataggcatactatagcatagagagtattctcccttaaagttcacttggtgatataatttccttggttgcacttgcactcaatcaagacagacggggccatcctcttgtccaaagttcctgaatggcaatccaggatttgtttgcacagaagcagggcatctacagaggaatgctaagattattttcattttcatttcattttctagagcaggtatatgtgcagctggatgcaggtgggggccaaggatgctaacagggtcttaaaatgcaaaatggggtgagaggactcacagattgctaagctatgttttatgcttatctgtttcagggagactacaggggcaatattatatattgaaaacttactaattgcgaatatttcttgtggtgttaccacaaaatctatgcaaatgtggaaaggcagtaggtatgcttaacaacatgtaagtttatacagcaataaaataataatacttgtatttagaacaagtaatataactatgtttcttcttaagtccaaaacaactaagagatataaaaatagtgtaaatactgagaatttctgcttcattgatttttgtttcccatgtgtcttttattcataaaagtgaagcaccatataaagcatttgtttttttaaattaacattctatgcctttttttcagtgtctattgacaacttaactgcccatactatttagacttcaaaggagaaaattaaattctcaatagaatattttcaatgttatcctggccaattcttgagtaataaggaaacacctcctttctcaaagcaccatattttcctcagtgtttgcactgttgtctgctttcctgccatacccatgaccatgcactctgatgtcccagaaaaggctttctaagtaaggagtcttaggaaattcacccactctaaatatggtcaggtcccaaccacatctactcactgcaagaaaatatattagaaaacagactctcatctcagcccttctgcagtgtgttgtgcttctgttacagctactaagaatgctttgagttgccatggttagattgtttggctactgtcaaaacgttgactcctttgatttccctgatctcagactaaagatctctagcaactccaatcataaacaaatgtattcaactcatagattgtactatcaagtacaaatgataggaaacagcttagtattcggtgtcgtggtgatgaataattctgttagtgtgcttggatagagaaacaccaggagattgatacagcatctttcagcatgtatctgttacggtgtttcccaagaggaatgattaaagtaggaatcttgaaagtatcatcccataagatgggccccacgtggagatatggaagtagggagaagaagtgagaaccctcagcacaggttctcgtcctcacttcctccacccagccctttcaatggccacttacctaagctgctctgttcttcacatcactcatcccagccataagctaaaacctctgaatctgtgaaccaaaacatatctgttcttcctcatctgtcccatcagttgttacattataggaaacagaaagcatggatgtggctctgaccctgagcatctcaggaaacaaagctgcattgagaagcaccaatgactaatagaaatgctgcaaagtaaatcatttcaaatctggccatagggatcagacaaggtcacaaggctttgtgacataatacctgtaatagtctgctgatctctgtatcacatcaccttcagaaggaagcatcaccatttatttacatttgaaagcactgatgttattggcagcattaattttgtgaggtcctcaaattataaccttagatcatcctcaaaggtcgtaaggaagtcatagaactgtatttgacaagacattgaacttgtattatgagccacacactattctgatattttatacacatttagagacctataattagtatctaccaaagagaacactaaggcaccaaaatcacattattgctttttactcactatcatggagctacaaaagcaaaaattttattgtgaaacaatagggttaaaaatatgctttaaaaccattcaaagatgttgtcttttgtagcatgttagctaacactgacccataagtgttttgagttatatatttcctacccataaagtaattgccataaagaggattctctctgctataatgttataaaaattaaagtgtgtaaggctctaggttgagtgtctaccaagtccagtgtgtgtttgttgaggacatgaatccttatctcagagaagtccttaccagggtgattcatctgaggcacaggctgtaacagatatgctccaatgtttcctatagtctagaagaatctggggagtcttgcatgtcatgcagcaataatgaaccctgcatatgagtgcccctgggcttttccctctgtagattacaccaagattaagagccatgtttctgtatctagaaaatattacaggtgcccgagccactatttatagcttcacaaagttgccaatgtgattttctacaacaaacatgtcaactccaatgccttgattatgcaggtacctagcagagagacttgtgcaacgggttatattagtgcctctaaactcctttgggacacatttagaatactgaattctgtcaccttgaaatactttttccacatcaactcaacttcctctgcatggatctgagggaattggcattttattcataacttatccatatgggcaatgatcccattactcttcaagatggaaagggaagccaaaaacacatgtaagtcaaaaacttgtcctttgacaagtttcagtgctttggccagaattagatcagaacattgagtcccaggaaaataaattactgtttaaattatttgtttctttaaaaaaggaaagatcccctgtcttccaacttactttattttatctctttaaatagaagcagctccagcagctgcagaaaaagatggtggccctgaatgtcctatctaggtgtcaagattaagggcactgagaaggcagtttcatatgaacatttcttatcagaaaatgtcacttgattgttcctgaaaccaaatacatcatcagtatcccacaatcttctgttcacactgcactcagtatggagaatactcaaatgccaggaagaaaagaaattttatgaacaaaaattatgctcaccaaatccagctttggtaaaactttctcactgtagtaaagagattatatctgtcaatcacatgattgtgaacttctttgtagaacctgtgagagaaatcagatatcctgactccaagccattccctctccaaaatcatgtttcctcttttatttacagaatgcttaaaatgtgtcacttttcaagcagagaatgattcaaaacaataagggcaatcatagcacctatctatggcctaaaatgccagttaaattagtgacactagtataaatggcagataaagaccaagtaagatttcaggaaacccaaaacaacattgttaactctgtgaggctggaaaaggtgccattttgtaaagggaaggaaattgtacagatatagcccttcagtgaggaatcagtgggggactgaaagcatcactcatccctgctactgacagtcatgttacaactcaaccagctttggaagtagtcatatatacttgattctgtattcactttagaggttaggaggatggaatcagaaaaacttgctaagcatggcagcatgtgcacagccttaatttgttctctgtggttatatcttgtaaaaatttaaacttcacctactataaaaatatctgccaccaagagtttaatgtatctgaggtctatgacagtaatcagacattctgccagacaaataaaataatacaatgttctgtcaattagttttaaataatcccagagacttcagaaagatcctcgttggagctattggtttatttgcttctaagcttgggagagatgtcggtgtgtgtgtgtgtgtgtgtgtgtgtgtgtgtgtgtatgtgtgtatgtgtgagtgtcatacaaccaagctctgtttctgtgtcaaacagtgacttactgctttctgaaccacaatctccactttcataaggagtaggaagcaagaggctggagagatgtctcaacagttaaaaacacttgctgttctactagaggacacatgtttggttcacagaacttacgttgggtggctcacaattatctgtaactccaactctatcttcaagacatttgacactcccttgttgcctcctgcagtaacctgcactataaggcaagcacacacacacacacacacacacacacacacacacacacactaaaaataatgcttttaaaagagaacccaaacaaaatctgatttattgccagggttttttaaaattatgaatatgaaaatagttaaaaattatagtgctattaaaatgctatgtatttctgttgcattgtatagagggaaatgattcaaagctaattaatatgtagcataaggaacacctaaaaagttggggagtagaatcattcattttaagaaaacacagtctctctcactggtctgcttgttgtgaagatacaggactggccagtggggcacagatgctgtgattcctgtgttgtagttttccacacatcctgcagcagactgtggcactctggaaaatgaagtgagggccatatggagaatggctgaggaaagtactgtctgattttgaatctgcccaggccacttttcctgaaaaatggaaggccaaggtctcttcaaccctcaaaacccaaaataagtatagctaaaagaatatactaagtggcttttgttcaccattaccttatatatgctagctccaaggccccattttaataggcaagtctctctcatagtgaacaattacaaggacaatgacattgattgtaatttgcaaaagtgacattttacccttggctgtagatggtattttttggaggagcccataatgtctcacacatctccaatcaatctgtgacttgtgtctcatactgattaacagcatcccccttccctgtctgtgacctcaacataaaagaggccatgcaaccaacttcaaggacatacagaaaaaaggagcaaaacatgaaaaggccaagaaataaactcttatacctgtgctggatttctatgagactctgcagttcagactgtgtgtgagtgcatgtgtgcttgtgtgtgtttgtacatgtgttcatgcaggtctgaacctgcatgtgtgtatagggggaggagaggaggaaagcattgaatgagtttagtagaaggtagtgaacggacacagaaaaggtacagaaataaggctgaattcactttgtatgtttcagtaccctgcctgtgagcagtactgcttatactatatcaactgtcaattaggctaatgacctcatgcaaacttactttgatcaacattctcttagactataaaatcttacttttacctagtcatgtcttacattaaagaaatatctgaagtataattgtttcatttctccttaagaagattaaaaatgacatcattaataagtcaaatgcaattttagttagtatgtctttaattaaaccaaacaaactttcttcgcaaagactttgagttttccttccagtccctccaggagaaagatcaacatccaatgcttcagctcattaggttgtgaagtttgaagtgactcaaacaaaaagcacattcacaatggcaagttaatagctcataaatgaaattcctcttaaaaccaaattataagcgacattttctgaggtaagcatttttaaaaatagaacacatttgtttctgtaatctcatgtagatgggcacattccaacaaagaaatatagctgaagcagaccagagcaatcaggaacaaacattcatgcagctgcagcttcagcatctctgtcaatgctattttctcttatgtgatagccagttttatgtcaacttgacacacaagaacattattttggaagaggcaacctcaattgaaaaaaaaaaaaacccactagattggcctgtgggcaagcttgtggtacattttcttgatagatgatcaatgttagcagaactcaaattagtgtagtaagcagaacccaacatagtgtggatagttccaccctgggctggtattcctggctgctataagaaagcaggctgaatagaccatgaggaacaagctagtaagcagcagtccttcatggcctcttcatgagctcctgcctccaggctcctcccctcttgagttcctaccctgagttcccttaatgggaaactttgatgtgataagcttaataaatcttcctccaaccccaagttgtttttggtcatggtgttttatcatggcaatagaaagctagctgagatcccactagtcagaatgccattgatttcacatgtgcaaactcacaacctgggctaatgcagcaaaaaagtccacagagtgcttgttttttgatgggtggtgggggagagcctctttcaaccctacattcttcttttatagttaattttaattcagtaagggaggctgcaaggcctagaagaggcattacaatgacagtgcagcagtgtatatcacagattttatcaacattttcttcaaaaataatgtctaccaacttgaagtggttcagcattttttgttccatttccccatatatgccattgggtcaatattaatacatagaagataaatgttcattaagctttaagagattcacaccagaaaacttgtatgtatgatccagaggctagactaggtatgttatacttgccaatgtttaagatgagactgctgcattgcagtagtctgggaaatggatctagagatgagccatcttgaacattagcatcccaggtactcaggaaggtgctcaaactatctaaccacctttatccccctcatgaagaacagcttatgtgatctgctttcacctgaatttattgatgtgcctgccccaggaaattcctcttgccagcttatcatgacaatccactcattcttgtcattttggcctgttactgtccactccaaaacaaagcttctgttacaagaacagactacattgttactctatttgaataaacattatttagatagataagcagatcatgtttatactctggcataatggggaatgtatactatgccttccagtcagggaagatcacagaagaacaacaggaacaaaaggaactagatctgtacttctgtgagaaaaggagcccatgtagacatggcaagggcatagactcagatgctgttgtatctagcacaaaacttccacaagattaggcccttaaacatactatgtgaagaacagaaagactcacaatgcctctctgctctctgtggatctagattaattaatggtttctgaagaagaaaagatactttcttctgccatgtagctaatagtaaggtgttcatattcctgtaaataaccatttgtccatgcttcaaaaagtggcaccaatgaaactcattgggtcacaaaaataggatgaagatatgaaaggaggagggtgatttggaaagaagaagaagggtttcatcagtggaggaagggagacaaaagaggttaatgggaataaatatgatcaaaatacattacgtgcagatctgagaatggcattgcaaattcattattaattggagtattaaattgcatgtacaactagtataagcaaataggaatacacaaaaagtattatctacacattgtggcttatgcttataatcccagcacttggaagaatgaaaaggcagactacagagagactgagggaagtcaggcctgcagattgagccactatctaagaaatcaatatcaattatataaataagcactaaggccgggcattggtggcacacgcctttaatcccagcacttgggaagcagaggcaggcagatctctgtgtgtttgaggccagtctgttctccagagcgagtgccaggacaggctccaaagctacacaaagaaactctgtcttgaaaaaaccaataaataaataaataaataaataaataaataaataaataaataagcactaagtatgacaccaaatgataagttggactcttggggataaatgacaagaatcagaaaggcactgggcattgtggtgcatgcctgttttcccaggtactagggggatattaggacaagaggattctaagctcaaatcctacctaagactgtcaaaataaagtttaaaaggaaaacaggttgaggatgcatcagtggtacagaacatgtcaaaataatagctcaaaggaaaaagagtctgtgaatgtattggtgctacaaaactggcctaaaggaagcccaagtgacagtcatcaaagtgaaaatcagaagtaactaataagcatattaattaaaaaggttacaggccacagagatgattcagctattgagtacttataatttttctacagggctcaagtttgggtcccaggatctatgacaagcagaatacaactgcctataatgccaggtccaggtccaatgcctactcatgtgtacctattacatcagatatacaacacacataatccacaataataaaacaaattataaatattgtaaagattactatttcccagggaagctgtcttttttgtagttttacaaatgtgttctctcttcttcctgcccccaaactgagctcatgtcttctgtcaacatcattctccctctcagattctgatttttccctctatttccaacccatatactcatattgtctttgatggattgagctttagtttagtaaggaaatttagaatagggaactctcttgctatcaattttcccttttagttttcagatcaaacctttatttttagagaatggttcacaaaatacagcagtaattataggaatcagaactaaaaatataaaggaatatatatttcagtggattttgtatctattcacccttggaaattgaccttcacaacatttagaacctcttatttccttcctaatgcagtttatcaattctgaaggagatagcatgtaatatatacttcatgtcatggtggctcctattcatttgatttaactttgattatatattcctatgataatgtttccacagtctaaattttacgaaatttacttctagggagcttgaaaactgtattgctatataaaatccccctttgttctatttagtactttagtctttgttgtagtgtgaaagagaatggtcctcatagattgatacttttaaatgtttgatctccagttggtagaactgtacaagaaggactaggaggtatggccttgttactgggggtgggccttgaagtctcaccattcccagttctctctctctctctctctctctctctctatatatatatgcactgctccagtactttgcctaactgcctgctgccatgtttcccactgcactggtcatgcactctaaccctctgagactgtattgcctataaacaacacttgattttatatattgctttggtcataacatgctttggccaaaatagtcctaaaattctattttatgtgatccaatgtgtcttttgtttctattattggtggcatgtgttctgaagcttttattctaaagagaatatttcttcatggtcaggtaatttcactagttcacatgaaaagatgcctgctgcttgtaactgttgtcttttccctcatcattcacctattttatctctgaaaatatcttacagtgcccaagtcttttaatggtgccttactttgttactacctttatttttctaggattgttataaaaggaaagatacatagggaaaaatgtgggcacacaggatataaatatggaaacacacagatattttctgtttttctgagtgacttggatgacaaagaaagcacatactgccttggctatcttcctactcattatgaagcttggttctgagagtaactgatctgcccatattcacagaactaattgatagtgtaaagaagataaaggaataacttttcacttctattctttgcactatagtgtgcctataacctaaacagttttaaaatatataggatataaattaaataagaacattgtggtttgagcgaagtccttattaatgacctctatatataatgctaagaattgaaatttagctacttttcaaaagctcccttcttatcaaatgaacatacatccttcttaaataaaggtaatggatctgaaagtcaacttataactgatcttcataacatttagaaccttttatttccttcctaattcattatgtcaattctgaagaagataagatataatatacacttcatgtcttggtggcccttgtttatttgatctttgattatatattcctatgataatattttcaaatcacattagaagtggagacaatgttacaaagatgagtcagccacaatccaatgcaagatttcaagttgacatcactgggccagtctcgttccagcaattcataagtgccctgctactaaactgaccacactgctcagatcctcatttcttcctgaattatataagctttactcagtatcccgtattatttttaataaaaattctcttctgtttatctctaacctgtgtattgaccctgagtttataagaaggactgagctatgactgcaattgaaagctgtgggaggctgaaaagttggctcatttttattgaagcactcagaagattaaccatatgacccatgatttataacatcagttataagctgagaaacttcacacaaatggacagatttcacaaatagccctccacatcagaactcgcaaaagctgcctttttctacgaatcatttttactagtattattattgttaatggacaaataaaaagaaaaattacactgagattaacatgccagattctaacactaaacttttatgtcctagagaataaatgtgcattacaaaaataggtccatcaccaaaggagaagcagggtactcagtgaataaataaataagcaggtcgttttccaaaggatgatgcaaaatgggaataaaacgaaagtgaccttgtgggatgcaagaaagctcttcaaaagtaggatacatttcagaagggacaaagtgtcaagaggtccacttagtatataacttagtcatttattattataagcataatacacaataacaatattctaattcagttagtttcccatagactaattacttacaacatatcaatagagagaaaatgaacatcctttctgtacattaacatgagtgaccctacattttcatctcagttcacaaagacaggaagctcaaaacaaagataaatctactttattgtagattcatgtgtgtcactacagtaaaatatcatgacaaaacaaaatttacagagaaaagaagattatttacatttctaggttacagtcgaacattgtggagaagtcataccagcagaatcttgagacagtgcatctcattacatccacaattaataacacagagaaatgcatgaatttatgcttacttgttctcaattttatttctccactctacagtattcagtacctgccctgacgaaggaataatgccatccagagtggtcttggtcttccgtaacaatgaacaaagaccatcacccacagacatgcttacagttcaacctatgtctataatccttcactaagactctttccaggtgagtctatgttgtgtcaatttgaaggtaaccatcacagtattgctacataaaatataaattaatataaagttatttctgttttcttttgattgttggacaatctaacaccataatatgtataaggaaaattaaatgtacagcatcaattgatagatttgttaacaatatactccatttaaaataatcgaactggtttataaatcatatgtaaaaagagtgaaaattactgatataattaatttttgcccaaatatcttccttcacaaccctcccattaatccacattatataattcaggaattgtattctttgttttccttttagacaaagcaatgacattgccactgacagtgttcaagaagattgacttatttctataaaacacacattagccaggtgttggtggcacatgcctttgatcccagcactcaggagacagaggcaggcagatctctgtgagtttgaggccagcctagtttccagagtgaatgccaggataggctccaacgctatacagagaaaccctgtctcaaaaaccaaaaaaaagaaaaagaaaatacacattagagagcaaactttccttttgtttactttctccatgtttttatttgaattagaaaaaagattgttttacatgtcaatcccagttccctctccctcccttcctcctctgcaaccccccccccaggcaactaaaaccctacttatcacatactctttctgcttcccagtgagggtgaggccttccatagggggggtcttcagagtctgtcatatcctctgggataggacctaggcctactcctgtgtgtcttgactcagggtgtatccctctatgtggaatgggctcccaaagtccacacctatgctagggataagtactgatctactataagaggacctgtagatttctgaggtctcctcaatgacacccacattcctggtgtctagatcagtcccatgctggtttcccagctatcagtttggggactaagaactccccattgtttaggtcagctgtttctgtgggtttcaccagcctggtctggacccctttgttcatcacttgtccttctctgcaactggattccagttcagttcagtgattagttgtgcgtgtctgcttctacttccaccagctgctggatgaagactataggatggcatataattcagtcatcaatctcaatatcaggggatggcatttaaggtaacctcttctctgttgcttacattcttagttggtgtcatctttgtagctctccagacattcccctagtgcctgatttctctttgaacttataatgtctccatctataatattatctcttatctttctctcttctgctcttcccccaactcaacctccctgtcccatcatgtctttctcccccctcctcttctccccttctcattctcctagctccctaccccctccaccccagcccccatgctcccaatttgaaagcaaatgtttctatttaatatcattgaggagaataaaggaagactttgaggcaaatgtacattcaaagctgaaaatatgaccccatgttacctcccaccacctttccatcttcctggagaatgaggctgagtataaattatgtgtcccttatgtttctcctgatgtattgcatagatttaactgtaggtacaggagcctgtttccccactgctgaattccggagtctgctttgtgagaaatggtgtacaaccaaactacttccaatgtaatactacctctaatactaccttatccatgcacagaatgaaaaatctagaggagagatgctaacaagattcaaataagacacagggttcttctatttcatcagtagtgagacacaccagggaaactgagccagactgactagaaaggtgtcttcatataccacctccccatcacacaagctgtttttcagcttcttcctcttcccaccaaccagtatgcacagactccaaatggacaatggacaaacactgagggactggcaggactcagaaaggccagaagctgaacttgaatggcaaataaaataataatcacatcaaagaacttactattcacctcagagaaacagaagctttaataactgcattaattatggatgttattgagacagataaaaatttaataaagagaggggatgaaagatccctgctcatggcaaacctggaggtccaaggcccaggattacactgcaactttcagaatgaactgaactttccatttgagcacatttgccttgagaacaaccaggcaaatgggatacacacatggcacaaaagagaggggcaatgtaaaggtctgatgtcatatcagctgggagcatcaaagaccttatcttggctagagtttccattgctgtgaagagacaccatatcaacagcaactcttataaaggagaaatattccattgggatggtttatattttcagaggattagttcactatcaccatggtgcaacatgctggtgtgcaggaagacttcaaagcacatgcccatggtgacaaggtcatacctgctaaatgttgccactctctgtgagctcatgggggccagttttattcaaaccaccccagaccttatatgaagaaatcccatcagaatgcatgtgtcttgttttggaagtttgcattgaattttctgcatttgtttgagttcattggttctgtttagccattgactctctcaatccttgttggagagttccagaactacgtagtccccccaccaatcaaatccatacccctgctgtaaaaacaaactttttttgacatctatgaatggtttaaccagaacccgacttttcttagaaagacttgatatttttttattgccagaagcttctactgaacatctcaactactgaaagataaaggatctctgcatctcattcaatcccaccaacgacagacatccatacacctgggaaaagctactacatgatagaaagatccttgtatctcattgaatcccacctgcaacaggcatccatacagttgggagaatctttacatttcaaataaggcaaactgtgtctacagctggaatgtaagaataagaagaaatgggaaaaaagctatatgaagcctctacattaagaattctaatgaagctatttcacgttcaaagcaaaaggtgcaaagaatcaaggtaaataatcaacgcaactaataggaggagggaggcaaactaatagggagatacgaagcttaactccactttgctttcttcaacagattctcaaaacagttgttaatataaagagaaaaaggacaacccagaaggctggaaagggaggtcatcatacatctgattactaatatgtgacattttgtttgagagaagtgagggaaaaccccctactatgatattctatgacaatccaagtttacacaagaattgaaggttatcaagtgacctttctctaactagattctgtgttgctcgccaggattttcagtgctgcttattacaaagaatggctacagtttgagaagcttgtgaagtgtcagaatgtttctattgagaatgacagatgtccatgctcagaaagtgcttttccattgattgtcttaaccatgtgtctgataggccattggaaatttagccatagacccatccatggtccctggtcagctctcctcatttataggagcagatgttgggtaactttgcagcaggtgactattctcaggatggcatcttctctgatttctagaaagtttagtcaatgaaaactattagtagaatgttaccaggttataaggaaatgaaaagacaaccaaggggttcctaccatgaccactaacattaatatatttcctccaatcttctatgtccttaacatatctctcctgccagaaactacctttaaatttttgagatttatcttttctatgaatttctcctctagcaaacaatctttcctccttggtaaatagagtaatgacctgaaaagaaaaagaatgagaaaatgttggtttaaataaatggaactttggataaaatgagctgaagtacactgaagttttaagttaaaatttgtatgcaaattatttacagccatcatgaaaacttgtaaaataaatggtgccctcttcttccttgactgggaaaatgaaagaaaatataagacctttctgctatccagccaagttcagctggagaatgaggctgagtataaattatgtgtcccttatgtttctcctgatgtattgcatagatttaatctcttctagcctcactttagccaaagacactaagaagaaaaactgcctaagcaaggcagctcaaattatcacactacttcacgcaaactgcaaagaactctgatgctattagtttgaagactgaaagcagctgttgaaacattctgtagctttaaaaagatcccacaaaaaagtaaaaggtatggatgggtattctggaccactctcctatttcacacaggtgggaaccttaagttatatgattcctttctctacctaattccaggaagttacatcagatgtatcaaatacaaatgggccatgtcttggcacattccaagtgacagacctccatgcatgatggcttaagctacggtttctctctcatagctttgcaatctgagaagctcagcatgaaaatctaaacagatctgctgtctcataaagatccacttccagacaaatgtcaatcaatgtcctcactgtgtgttcatcggggcagcaacaatgaggggtctcatatacaaataacacaaaattcattcatgatggcttcaatctcaggagctgaacacctccccaaagtccactttctaatacttcttccttagagattagaatgtcaccacaagggaaggtatataagcctcagtcaagaacaaatagtaaccatgttctgaagactttgagtctgaaatttcagtgaaggcacagacattcccagtgggacccatctttgttagccttttaatcaattccgagatttttcttcccaatggttaaccaagcaggccaataatagctctggactcccagctgatatttccctctgcactcacagaggtgttgactgcccagaagtcacagctactcatggaccactgcctccttggctgtccctttgccacagctcatttgtcaaacaccttcaaagtttacacttatccacatttatcagtggctttaggagaaatgttagggacttccctgtgatctctgagctctgctatgtagaaactctctcttttagaccttctaccattagacaattaatcatgtattcacaaccaccactggttagtctggtttatgaacttgtcctgcctggtgcaataggtctgtgacaccagacactacagtcagcatagattaaagggagatggatcagcagtaaagcatttggtggcaatcccaacaaccttattgcagtcccttggacccattcactggaaggatagaaccagttcctgtaagtccctctgtgacctccacaccagtgtaaaatttctcactcatatgtgtgtgcatgcgcacacagacacacacacacacacacacacacacacacacacacacacactgcaataaaaaatcaatagctgtaaatagcaacctttaattaatttttaaaaaattgtagaataaaatttgctattttgcacaaaataaactgtatttatatttacattttaagtaatttataaagagcttttatattatcacataccagtaatatataagaaaattgaggcctaaagtaattgtaattatttacatgtgaacatcaatactataaaatgtttaatttttaatatacaactttgtgcttcatatgtattatacaagtgtggctaatatatattaaattctttaaatgatacaaggacaaagatgcaattttcatgtcttccttttttaacatctaggtacatgaaacaatatctgaaaacaaagggaattctttaaagaaatatgggctatttaacctaaaagagatccaacagcaaattcaatatttttatgtttccatttctgtaattacactcattcactgtgtgcttagatgaacactcctgactagacagtgattccttttcttcttttttctttttttcttttttctttttggtttttcaagatagggtttctttgtttgttggttggtttgttttgttttgttttgttttgttttaggtcaggagttatttgtctccactgcagaccttaatttataaattaggaattcattaatgaattaaacaaacaactatcttcacacttttacctctaggattaacatagtaaataagttaactttatagtaaaaaatgtaatgaattaaacaccacagagaacagaataatgatggtgggagccggagtgctgaggcctggttgcaaaacaaagccatgctttaagtatcatttccttccagatacaaaagacacacagcccagtcactaaagctaatgaagatatctcatcttcttggaaaatgttaggagagtggttgtttattaaatgttcttcccacaaaaatgagaattatatgaggaggcatatagtttaattatgttaactagcaaaacctaatcagtccacaatgcatatattcttcaaaacattataatgcacataataacacaattttaaccatcaacttaaaaataaattagataaaaataagattgcactattcatttaaccaagaggaatatcagttaaagaaaatgtttttcctacaaattctgttcatacagcattcttttagggaagagtgatagttgaaaaataagtagtagataaagagaatgatgatagatagataatagagatgatagataattagctaaaaagatagatcaataatagttgatagatggtacatagacaaatagcagatagataaatgatagatgatagatagatagatagatagatagatagatagatagatagatgataaacagacagacagatagcatagcattgatatacatacagatgtacataaccaacccaatgaatcttttttgtttggctattgttgacatgtaaaacaatcttgtttctaatttaaatttaaataaattaaaaagataccacagaatggtgagcctagctatgatgcagtgttgaaaggccataaaggtaaggtttcttgttggagtctgttcagtttgatcatcttgaagttaactggatatctgcagttttcttgatgatagtgcatgaattttagcaatttactgtttctttcctagctgtctgtagatgaattaggcttcatatgacaatctgaacagggccaaagccagacattctaaggacagagctccaaagcaaaggtccagtcattgtgagtggtgttccctctgctacaagcagaaaaaaactataaggacatgctcaaatcagggatcctcttgcagttacaatccccacaatttagcaagaattgaaataatacaatgacccatagctcaaatctccagtcccatttcttagcaataaatacacaagttaaagggtgagtaggcccttccttggaatgtggatcattgaattgagatttgctgtaaacacaaaagacacacttgaaatcgaatggttactaagaaaaaaagaagggaagtatccagttaatagtttcttattgctttggagttgaaatagtattttgtaaaatactgggttaagtaaatgatcatattgaatttaaaaaaaactattttttttttttttgctgtagcccttgggaatataaaactgaacttctctgtttctcattcatccagcttcccccattcctcaaggctgtgcattgtctccatctgctacagacagtgtagtttgtgaagcagcatgaggaaaagcacttagaaaaatacagctgctctctcactgtgagagcaaagacctgcctcctaaaagaacctcactcacagatctaacatataactcaaaggaagtcttcacacaccaaaaaaatctttagaatgtatgctaacattgtggaatccttagagatccaactctgcctcatagacagatgattagatgtctgcatgaacacaatcacttgaaattgcaatagtgtacatatgaggctatcgcctttaagaaactcatgaaatcggagtttctgtcaaaaattattctgaaaattaagttacaaaatttaattacacagaaacattttgagtaatgtaaagactcacacactgacttctaattttgaccctttctttgcagatgtggccaaaaatatttgaaagtatttctattggaataaatgcattttcatccactcttacattggactgtctttcatatgttacgtattaaataccttaaatacatgagtgacaatgaagttgtctgctgtatggaaacccctttcatctttacacaagataagtcaagagaaaaggttatgagagaaaagaacagaagggagagaaagcaaaaatgaaagagttaaagaaacaaataggtaaggtatctttctggaaacagcccagtgttgagtggatatagcgagtcgtgtgtggtggtctgggagaacaggagtccttggagtattcatctggtagcactataatgacatggaagttggaatcagtggctccaggatgtatcctgtagcaagacttgaggtaatatgtacaaatattatcaaagacttcagagcacctgtggagcctgtgtcaaaacacatgacaagtcacatagtggatgaaacagcttggatgcacatagtcaatggagtgataccaataattctcaagttaaaccactaaattattaggtcatttaataaagccctgtactatgatgaaaagcttttagggtcacactatctatggagcagaaataattagtgtctctttacaataaaaatcacttcattataatgctctgtttttatagtgtaatagtaaacacttaatcaaataaagtaactcttttaggaagtaaaacccccctttttatgcagacatgacaatgaaagatcaattatttggttcattttcttgcaaatatcttttaaattttaatatttgacatttttcaagtagaaaccatagattcatttagactaaggctaagggaaaaactgtagaattagatacaataggcagacaaattagtatatctcactaatttgaatgaatacttccacatcttggaatatcttcaagatatatacagaggatccccaaactctgaatgttcttgaccatgttaaatacggttaggaaatatgcaaggatttcattgtaagcacacatttcattatctttgatttaaataaatcaatcagatgggattaaatggttttgaatttggattgactccaactgacattttatttcttattcccatgagcaaatagccatccttgttttatcacctaactggactgtgttcctggccctctggccatgtgaacaatgaactccagttacaaagactgccacaaacacaacttcaagaggccttgctcaggaacaatcattccaacagtttgaaattttctgagagatccacgtcagccaatgttctctgtattctctgtaaccttacatacagttactctggacagcactgtctattttgtatcttttcttattgcggctgggttttttcctgttctactgtatttgtgattgacaataggaaggcctgcaagtttaaagtttctaattggttcatgttggatatttctgaataataaaaagtgaagacatacaggtgcaaggcagtgactggagcagctagaagatcaggacaaacatgccacacccatctctggctgcatatttatcccccccctttgaataattctggggaccttcttccagtgttgcaatattaacccttaataaatgttttgtctggtggtctttggtctttattatgagtagggcaagctgagatgatcagatacagaaaatattccagggcctcctgccccagcaatgcagcaacagagagcatgagaaggtggttgaagagttccagagagcagccatggcagaaactgcaagatcagacatgatcaaagttgagacagtgatgggtacaaagggaatatgaagagccaaaggggtaacactgggaataaagttttgccaagcccagtgctagaagggtagagagactttctagtagcaaagaacagacagggggatccctgacacccaaggcatgagagcagtaacattatctgctagacactaggctgctgtaatgtaaagctaaaaaaaatatccctcttttcttgagctcctggagctataatctgttgctttgaaagcttcctaccatagcctttagcttttgggacctagaactataaggttgtatgtctgtaaacccagcctataagccagtggcactccagctcagactgagaacactaagggaagtggtccttgcctgcttgcagtgacccaccagcaatagctctgtaagactaggaagaaaaggaaaacaaatgactgcagttaagttttccatcagaaagacaggtgaggattcagatatggactcagaaaggcattatactaaaatttattctccagctggcaagatggagtaaagacacttcttaccaaaccagaagatgcaagtttgagtccttggattaacatgggggaaggcaagaaatgagtcctacaagttgttctctgatcttcacacatgaactctgtcaacacacacacacacacacacacacacacacacacacacacaaataaaattttaatttattctccttaacaaataataaggtgagtccacaaggtaccaaaagaataacctctgaaccccaaagaaattttgtagaaatgacttccatctttctctccaaaaagttgctaaacaggctataggatatgtacaacagcctggagacatgtagatgtacatatatattcaagtagattgaataggaataaattgtgggaagtgccaaaaatagatggaaggtagcaagacattttcatcttataatttggcttaaattgtatcagtctatggccataccacccttaactcacccaatctcttctgatttcagtagctaagcagtaccagccctgtatagtacctggatgggagagaacatacaggtgaggccatgataatggaaaactttagctaccacacattttctgtgaggccactggccatctcagcttgcttttcctctacctgaacttgatcccaagatgggttggtgtagcatggattcaaatagtgacacattagagtaatgaacattttgtgattggtcccgttatctttcattcagctgtgaattcagagatttttcagtctgtgaaagataggagtaaaacttgagcatcctggctcttacagcctatgcttcaacatacttaaacatgctctttacacaagcagtgctatcaagtatctgaactctatcctgttgcagaacagccataacccagagtgatactggaaatttttcacttttcaaataagaattacctttctctattcttcctgattccttaagttctcctccactccttcctccccactcctttatgctcaggagatcaaataagaattacatacatccaaggatgaacctctacttgtacaaaaatttaaaccatactaagtaaaattagctctaacactttaaagcagatttggggacaagtgaaatgcttggtaaatacaggcagtttccaatgaactgaatgacctgagttcagtccctgagatccacattgtggatggagagaaatgaccttcccaagttgactcccacaacaagagagagattaagacttgtactggaaacctagatcactattcagtgctactgaagtcttggttactggaggagaatctacaaccactaacttactaaaccaacatagtccattacaacaatctataaacattgaataagtgtagttttcacctctcataatggaaacttatctttgcaacatatggatagcactacagaaaaccacaaccaataaaaatatagaattatggcacacattcacaataaatactatctacaaaacactcccatgcctggaaatattgcagaagaggagatggacagataaagaaccagggatcagggagtttgatgtgagattgtctcctggtagtattacaagccacacctataaagcctcaccaatatgacctccaaaacctgacctgaacaagaatgataccaatgaacatgccaaagtggataaagagaaacatacaaatcctcaactgtatgcaaaggcaactgaggaactgtgaataggagaggtaaccttccccctggagagcacacaaattgcttattcagtagcaatcagccctgaaaacatacacacaggtagcattatatggactgagcaggttatatttagtaatatatgtgtatatacatatgtgtatccaataacagttagtttaaaaagaggtaggttgtgaatttgaagaaatgaaagacaacatgaaagaatatacaagactttggatgcaggaatgggaagagacaaacgttataattaaactatattctcaaaaataaaaataaactatataaaaatttaagttatcttcagtggaaaaatgttgtcttctgatttacattattgcacacacacaaataaatcaagaaagaaagaaacaaacaaataaataaataaatcataactcatgttctctaatagaaatagataaaacattctagtttcctggaaaaggaaaccctttggttattgtaaggcatgatgagttgagctgagagatatggccttagggttaagtgcaatatttatatttatacttagatgcagcaatcatcaaccaagtgggagatatgtccctgtgtcaacttaaatcttaaaacgtccaacattgaaacagcttctacttattcaagcacaggaagcaacacttgagcccttctgaaagacacagggtacagttcatcaacacacaagttccatgttcctaaagctgagctgcaaagcaggagaaaggtcaggcaagtctggcaggcagagggaataaatagaaggaaaaatctgggaagagatatcaagaagcaaaaaaaggaggaggacttgaggggccagtctcccagctacacaaccagtaatggagtaagaagtaaaaaagtaaacatatatagagaatattgaaagaaaagtccagaggcaaaatgtagattggataatttaagttaataaaagctggctagaaacatgccaagctaagcctgggtatttataagaaagaataaccctacatgtatatttatttgggagctgggtggtgggtccatgaaagagccagagaattaaaacaatcaactacattatatacgggaattgttcaagaagcatctattttaatatttacttcaatgcattttctattgatatctttagggtcttttactccttgtatatctaagagcagtaaacttattcagaagtaagtatatccaaatttgcaaacatcattgcatggattaatgtctgctgtggcacactcacagatagaattcctaatacaaaaatccctaccttttagacatacctaagtacctaaaaccactataagagacataaatgtaaattcaggtctctagagaaatggtgttgttataaccacaatatcttattttgctacaacttaatcatgtgatgaagaattcagcaacaagaaatgtagctgctttatcaaaactggttaatctgacaacaggtatagtaaaacaataagaaactcagcaactattcattttattccaataactcaccaagctatctgtcccatgcaccctttacttaaggaagttcactgtgccaaaatcatcctaaatattttaatctcatatgagacaataaacatgttgtgtttcctgtcagtatcaccaatcacaaacaagctgtcactgggggtggtctttgaggtttcagaagctcaatccaggtcttttgtcaccctttcttaatgctgtctggggatctgaatgtagaactctcagctacctcttcagtaccatgtttgcctgggtgctgtcattcttctccccatgatgataatgaactgaacttctgaacctgtaagccagcccataataattgttttcctttataagagtttttgtggtcatggtgtctcttcacagcaacagaaatcccaactaaaacactgaaatgacagaagcaataaattaaagttccaggactggatattatgtaacactaaagaacaaggccttgattcttgcgtaacattatcatttgattcaattcctatcatggacaaggcacttcatggagtgaaaaatacaattacaaaactttattgatatccccaagtgtcttcccaacaatattagcaggttggagaggaatggacagagtcagaggaagtgaaaatgcacactgctatgtgtggaaattgctacatcaccatctacaaccactgtattataattcaagtagattaagaaacagaatgtcggggagtcactgaaaatatacaccatactgagtaagagtcaggaggaaagagaacaagggacatggtttggagaagagcaaatttgaaatcatctcatttaaaaatttatctgaagataaatgcttaggcagtgtgctgaaatggaactcaaaacataattaagcatgccaccagaaattaaaaccttttgaatttacccatgcaaaatgttcatacttgaatagaaatatctctgcccaactaacatttccaggtcaaattagttctgcccaggatgaatactaagggatggggagtacaaattaatgagttttattaaatcaaaaaccctattgaaattataagaagcatttacatgtgaaatgtataaacagtcaaatgattacataatcagaacaaagtctatatcatcaattatgtacctacattcatttaaacatgtacaaatagtaacacattgataggaacggagctacagatacagacatatcttttatcacaactatcagtttaccttcattagtctgtagcaacagagttaatgtcatatagctggagcactttggtttgatcctgtgagacacaaatccataactactaccagatttttcagactggcaatattttaatgaagggactttagctctcgcttctcttctttatctgaacttccaaaattttcctaaaagtttacttccctccagcaactcatccagtgctgcttcttgcacaagtatattacttgctaccttaattacttgtcgcatttctatcaaaagacatctaataagagtaatgatggaagggtttaaaggtacagctcaactccatcaggcagtcacagtgacaggagctttaggccactagctacactgtatccttggtcaggaagcagagagagatggaagctgatgctcaactctctcctttatattaagtaccaaactccaacatttgaataatgccacccacatttgcttttcccgcctcaactaatttaacccagaacctctcttacagacatgcccaggtgtgtctcttaggtgagtctagatcttgtccagttggcagtcattatgaatcatcacaagcattttttccgatgcagtccacaataagaaaaagagaagtgtacccagatgggagagatgagttacagcaaaaagtcaggtggtaaagtgcttggcacataagcacaatgacctgaggtcaggcatcagagcatcacaacaacaaaaacctaggtgtggtagagactctagtaatctcattactggggaggcagagacaggaggatcccaggccaccaggactaatgtagctgttatattctacaccaatgagaaaacatgtctcaaaaacacaaggcaatggctcccaagaagtgacaccaattaccgctctagccttgacaggcacacagaacaacatgcacttggacttacaaagcatgaattaggactagggggctctctatgatcaaactccatcatgtcaccagatgtgccattacctcaggagaatcagggctgcttccatggagcattatcatcccagaataagtcaagccatttctagcaaaggtttaaaatccaagcaactagaaactatgcttaaagtgaaagaacccatcattacaaaatatggaatggaaaaaaatatggaacagtttcatgttgtaacaaaagtactattcttagctgcatatgagtcttaatatgagttcaatgaagctaatatcaaaggtgtgtacagacaatatcctagcattattgaagtgtgtacaaaaaaacatacttatgctgtattctgagtattgagaaatacccacataattgcccacagggaactcatcattgcataattctttttctgatagtcctaaattatgtctgactagctcagctttacattataaagagcacagcagtatcttttttactaactaggaagcagggtgcagttcattctctcttcaggaatctgtcctctggccatcattcaacaaaagtaagatgtatagaatcttgatgtccaaatcattcagcagaatataaattgcctattaaagaatcacactgatcttttgattggcagatagtatcaggcaaggaaggaagaattggtgattatcaaatgtcaggaaactgaatgatattggatgagttttagattcttctgattttaataaattcccacatggcacagaccaaatctaactcataactcaagaaaattgtctctgtgctctgcctcttaaacatgtttgtttttcttctcagacaagattaaccattagtcattttaacattcacagtcatattagtgttggcctatgcagagaaaaagaaccattgaaaaataaatgtgtccagggtgttattaaagtgatcgtgtgaattaagaactttgacaaaatgtgtatcatgaacacaaaaaatgtgtttggtagcaggtgagagtagcagaaccatttgaaaggagaaaggatacagtcaatgagccacttaaagttgcaaaacttcaactttaacccaatttagtacttatcatttccccctctggaattagtggattagacatttaccaagacatgattagatttttttttaaaaaaatcttcctctgtactatgtttcatattggtttcccagtagactatcatctgaaactaattagcgagtagtctgaatgaggacaaatattttataaaccttaatatccaaaatgctcaacaagtgcctttaagaatatggtatgtagggatctactttctgaaaacattatttagccatctgagtgtgtttgacaaaatgtgaaaaaagaaaaaagaagaaaagaaaaccctccttaaatggtagtccatgcagagcacactaaaatctaaaatcccatacaaagaatagctctaaagcattaactgtgtataaacttcaaacataaaaaaaaataaaaaggcaagggtgacattgggatgtcctagatgaaagttcaacaaatccctccatcatcagaaaataaagattcataaaactttccctgtagaagaatacaaatatattttatttgcctctgtggaaaaaaatgtgtcttgaatttgtcttaaattataaaaacttggaaagtgattcacacatcatgatgaaaatatatttgaaataaatatatgcaccaatatcatccatctatcatctactatctatctatctatctatctatctatctatctatttatctatctatcagatttacaaaacatgcaccattctgtactttcccctaatatataatccattataatttgggagggtgagtagaaccacatagtagaggaaacctaagattaaaatctcctcattttatccaatatgcacattctagtggcactaaagaggaaaaaatgagcattccatttaaatagctataaaccagcaaacaataataacctaaaaatttgtaattaaaggaattccaattttatggtaaaatgggtaatatctgtttcccaatttcagcccatttcctaaatgattttagggttatagtctcaagaaagaatactatagtaataactgaaatcaacctccatccagacattggtggtgcacacctttaataccagcactcaggaggcagaggcaggcagatctctgtgagtttgagtccagcctggtccacagagctagttccaggactggctccaaaacaatacagagataccctgtctcgagaaaccaaaacaaacaaacaaacaaacaaacaaacgagaaaaaagaacagaaaagaatcaacatccagttgtagatgtgccatagtctcctttaagagttaatctctggctcaggtacatgatcaggctaagggacaaccctctgaaaggctggacactcctaggaggtcaagcttaccccaaggaaccatgctaggtatagaataggtggaataatttctcctttaataagaaaatatgctttctctcccagaattcccatccactaacgcagtgtcttactgaactgtagacacaagacttcatgagtccacccacttttctgaactaccaagaaaatcgtgactttcccatttcctttgtctatctctttcctaaggatgctgaatgttttccctaacacttggtcttctgctgagtttcacaggtttcctgccttagggtgttttgaactctaataaaattgtctttgagctaaaacacccaaaacaaaaacacacagatttccaaatccaaagaaaaagagatataaataacatccatacatgaaactacaattcacatatcctaacttgagtctcacaataattatatgagatcagatacttacactgtacattggaatagatgagagcctacagacatacacacattaacaggaaattagtccaaccagcacatggcttcagtgtgagtaatattgcagtgggaataagtgtgttcagtgtatttagttatattcctaacaggagttccacagtaccacagggtgattttagttttaattgatctgtgaatcctcaactttgctttccaagatggctacaacttgcaatgtgactaagagtgcaaatcacttcccctttgcttgcattcttgcaaacacttgatttctgccatatttgcaacaataaatctaatagaaatcagttgaatctcaccttcatttctaattttcatttctctgatgattagaaattctgatcatatatttaagtatctgccagtcaatgtcttttagtcatttttaaatgggtttgtgtatttcctattattgagtagttatgccataaggcaaaaatcactgagatatattttcagtttttgtagtttatttccgaattttatgatgctgaacctcatgatacaatatatgggctaaaggcaatgcacattattttgtctcttggctactgataaccatcagaaatgatggaatttttttgtcttttgactctagcaccgattatcttaagctctgctcattattgtctcagaaaactaggaaaacaaaaggattgatagatatttgtaaattcctttgtttgacaatgacataagacatacttttattgactaagaaagaatggataagaggatgctttgaacagaccattcttactagatctgaaagtgtaactgttgtttaagttgtttaaatgaaaacatgattaaaaatcatataacattgcactgaagagcatgataaaatctaacagaacactaagcttacctaatgaatgattctaataaatgaattgtgttcttacacactaaatcaactttatcagaataataaaaaccctataaatgaatgcctataaaatatacagtgtagcaatcagaatcaaagtagaatcctttgaaaatcagataactatattttcaagcaaaactgcattctcttatggttacaaataaatgctttcgatgtttgcttttaggaaacagctctattttatagtttttaaaagaacacaactatgttttgttgaagataaccattatataaacgtaaattcttagttcctataaagagattaatctaatgttctcttttatagaagttttaccattcactcaggttggagatgtcacattttaaacatactacctgaaaaattgtcatacaaagttgataggaaatgttttctgtttctccaaagttttactatttgttttggttctagaagaagtaatagtcacatatggaactcatcaacatctaggaattaggtaacacatgatctttagtttcagcaactctgctgtaagagctataattacctaagactttatcattgaccctatgttgctgccattttgtagtgaccttatttaaattccatccatcacaaagtcaatatgtccaaaattaactcataatccctttatcaccccatgcacacacatgtacacaatcctactctactcacaatattgttttcttctgcatttttcctgttacaaataataaagtcaccctggagtttctaactcccattattgaattactcaccaagtcctattgattctactccctagatgtccctttaacctactttcctaccattccctttgaaacatccttaattcagatctttattgctaaaatagcattctaatattctcttctacttcaaatcttctgatctacactctaatcctcccctattctcctcaagactattgaaagaataattccaaatcagacacagttatatcaccagctttccctgaaatttaaccatatgtatattacaaaaacatcttagtttcacacacaggtttcaatatcttttgttgtcagctacttgacattttcacaaccttcctatcacccacagagatcttacctttcagcatttcaaaatggattgatgggcctgaattaacccgtgcaacttctatccattttcccacgtggaatagaatgggatagaatagaatagaatagtgatgaagatgaagatagatggatgatatgcagatggatagatagatatcccttaatacctacttcccagtgagaagccttcataagtaaaggtatatgttaaaaatgttctgtccatggatattaagaaaggcctgactttatacctatcacggacatcttagaaaggtatctcatgagatcaactttgtgtagaacctttgtatttcatataattatttcaaaaaaatcaccaaacaatgaggcacatttaaaaattttactgagataataagttggttatgcccaaggccacattgattacttatccatgaccacctttagccctcttacaatcatctttaagcatagacaaactaatgaaaaacttctctcaagaaaaaaatggctattgaaattctccatttctcattcatgtttctatcttcctgtgagcacaatgtggataatctattctccaaaggttggttgttgtgaacagccttagatgatagatatagtgtttctttatagatgcaatagaagatttctatactgcctagaacaataaagataatttctcttttgagacaaagggtaggtttatttttaatttattattaaatattagaggttgaggagaaggttcagtcagtaaactgtttgctgtataatcatgaagacctaagttttcattgtacacataaaacattggatgtatgtcatgcatcagccatcatattttgaggagcagacatagaaagatccttgaggctcaggagcctcaattatgtgagctccagcttcagtgagagaacctgtctcaaaagctaagctaagcaggagaagaaatattgacttcaggcctctattctcataaacacacagctatttctagcatcctaagcacccatagaaacaaacatgtacataataccccaacccacacacaaacacaaacacacacacacacacacacacacacacacacacacaatgaatttgagttattttttttaatttgagtttccacaggcttgataaacctgcatgtgatcttattccatccttccatgagacttaagaccggtagaaaataatgaatgtgtctcacattgctgtaatgcagtggacattaaagtttcctatcttataataaacatcttgttgccccttccagtggccaacaagcagatccacttatatgactccaattaggactgctgtgaataataatgtcacaaagcaacacttcaagaacatatccagaaggccattgcagaatcacccaaaaggctggaaaatgaactctcaaagtggacacaggaatgtgaactttttaaatgtgcccaaataaatatttttattcaaaatggctggaaggactataaagaaagcttcaagtttaaatgtatatatcatttttaggaatacttgagttcagtttgcagcacccatgttaggaggcatacaactgcctccctctgtcttcagatccagggaatgtaattccctcttctggcctctatgagcactgcacacacccacaaacaaatacaaatttttaaatctaatttgagtttaacattgttatttttacctatgagtcttccctaaaacataattcaagaatgttctaggttttgtattagaggactttgttaatgataggagtcaccctttatgactcttaatatataatttattgccacatgacattgatatctcaatgtatcatttaattaaccttttcaatttttctgcaacagttgaattctttctatcagttgagctgttatgcttttctgttcaaatcagagacataggaatcattgtagatattgaactttattgtgattcctaagtaacttataaagaacaatagattaactaaacatgtatcatcccagaaaatatgactgtttgagtatatatagttatgagtaatgatacacatttatctaaatgatgactttgttacaaaatttcaacaatgtgcatttagcatattatgtgttacagatcaattctaatcacacaaaagctgtaacaatataccaaaatagaaaagtaaatactaaaaatattcacaatgactaatgaaaatcattgcagttagcttcaaaataagctttctttatggttctctgttctaattttcaaactgataaaagtccaaaagtttatcaactgtagaacaagtaaatacatttcaccacatcttgaataataaaaatgctcttcccaaatgagaatggagactatacctaaatgatgctgccatcactacttcataagcacagacctgaaagagtagttatgcaagagtccaccccctctacagtagttttcctggctgaagcagggagactgtgaaagcatttgcaatgggcccttgatactcagctgggtctacttttatgggtaatattattcagttctaagaatactaaaaaaaaaatggcttgtctaagcttaaagtgtctattctttacattacttgtcttagtttcatttctgttgctgtgacataatatccctacaaaaaggactaaagggttaattttggcttataaatactgattcattattgtggagaagtcacaatagaaggaccttaaatatctagtcacattacatctacagcctagatcagaaaggaataaattcctacatgcttagcactttctctgctgctccaaagtctaggatcccttgactagggaatggtgccacccacagttgttttggatcttcccatatcaaataaccatcaagaaaatcctccacagacatgccacaggccaacctgagataactaatctctcttagagattctcttctaataggagtcaatgctgtatcaagctgacaattaaaaaaatcatcatatcagtttttaagtataggaaaataaataacccatccaaattaagacatgtttgagagtgaatggggacatgaacacacacaagcactatacatactcacactagggccagttgatctcttgagaaccggtgatgctctaaatcaccacaatgctggactcttagcctggcctttttcaggcttcacttcacattgattttcagcctttctaatataattggaaagagagcacatccagaaggaacaaaattgcatccatacaatcatcttttcaaatatctattactgttctgtcagagatttgaacctgactatgaagaatccagaaaatcccttcccttcttcccacatcccacaaagtaatagagagagaccctagggggaagcctccagcagcactgatctatcctcataatcttttatctctgttgatcccaggctcagttacatcagaatattttactttggaagacactgcttatcaattccttccaggatgaaaatcatgtattaaagtgagtacctgagttatgccccaaggcaatattaaacatcccctttcctgctaaatgattttctgtcaactggagtgctggatgcccttgggaaaggcaggaattcatctataaagaattgccctacacagtcataaattaaatccccacaaatcaatggtatttagatttttaacgaagatagccaaggtgttatcaacaatgaaaaaaaaaaactctattcttcagtcagataattttcacaaatctaattactggaccacgggaaaaccacagtgtggtgaggcttgtttagtaaccgattcccaacaggaaatgttaagacaggagaatgaaaaggctctgtgaatgccaatcagaaagcttccagtggttcactggctcttttaggctatgatgttaaagatagtttatctctacaaccagatgcaaagaaagcagataagcagctcaaactggctgtgacaatgatcagataatatggtccactcactgctttctgttatgaatcacagcatttgaaactatccacttaatatactcctgtactttacagcctaatgtagaaatgtcaaactctctaattcaccaaaggaataatgaatcataaatgttacaatgcacacacaggtctcaatgtttatagacaagacactttcatttcatcagaactaaaattggcttcccaacacttgcagctgcagacaaaatgcccttgcttcaggaacttaaaaatagagtttattttggtcacaggttgctgggaaggccccttgcaatggcagacaatctttacatgccccttcttcatcctcacagatttcttggccagttgttcctcagtcttaggaacactgtttcacatacttgatggtacttttgggaacactgacagagtaaggaaaaatgtttctcagctgtcaataagaaagttagttacttggtcagtgtctctggtctgcagcatcaggctgagatttgtggtcctaatgcagcttacaggatttgggataatatatggtgccattagcagagctgagataggaacccacacaagaaatagagctaaggggatttctatgcagccatgtttgtgtgaagagtgataacactcaagctaggtactcaatttgccttcaccactgggagtctatagaatccctcctcagcaaaccagtcctgctaccaacagttatcctatcatataaatatgagaactaaacaaggcagtgttctgtaaagtgtttgttttgaagagagtctggaaaagtggttttcacatgagaaataggagaggcaaacagcactatcgataaaggcattaacttgctcagctctcagtaccacatttcctacttctacatctcttgtttggtggggaaaaagttcttttaagagcatatgtgctaggagcaaacacagcattggctgtgcaggaacaatgacttatatagaattaagaaaattgtatttatgctttaagtccaaaaggtgtgatgacttcatgtaaagaaattacctaaaaagtgagtctaatcaagttggcataatttgatatgaaaacagaatttgcatctagagcttaacatacatttaaacaaactgaatattcctaatctatgtgctgtgtacaacaacagtttgcaaaagtaaatggggctttgtatatatttagcaattcaaaataatatgtagtttgaaagagaagggatgtatgaaatgaattgggaaagggtacccaccaatgaagttagttttcaaggtaaatcagctgtcgattgagcatttctcatccctcaggactgtgtctacagaacagctacatatagccaactctctatcagatttattcaacttcaccaaatacttaaaaattccttgtaatcaagtagcatgaatgagaacacagttatctgccctatatgtagatatgagagtggtaatggaaacatctaaaagtaaaccctatttgagagctaagattgctatgggttatatagatttcattaagacgcatagtcataggcacaggagcagcctcccatctcccccatgaactcatcattcatcatggtcagtctcagagcctgatacatcagcacactgtgaagagcactaatgaagggaaaggaagggtggaggggaaggaaagaaattaagaaaggagggaaaagagaagggagtcagagaagggatagcagggaagaggagaggaggcaagtaaagggaagggaggggagagaagggaagaggagaggaaaggagaaatatacagagaagggagaagaaagaagggacatggaaggaagaggaatggaaatgggatcacactgtcactaaaatagccacacaaataaccaacacagactgaattttacaaatttgagcaaagctaaaaccgctaaaagatctgtcctagctttcttattttttatctgaatgtaaggagtttggaaataactttgtccttcctaagaattagaaaaggctggattaactggaaaaatgacactgtgtgactgcagaagggcagagattgaagtagaaacatccctcaaaatacaaggaaatatccattgggacaatgcaacagtgaaaaattagaccgggatatatccagacagaaaaagcagcaatgggaagctacttctgaagaatcaatacagagagaaccatgttgataaaaacacatctatgataatttttcatgaatcctagaaagtagtgtggacaaacaagagaaagagaaacactgtggggctgcagtcttaaagtggccacaccatattttgtgatgtttatcaccaagaaacccctggttctcacaaagaagatccaaaaaaaaaaaaagaagaagttgtctggacactaagtaggaggctgcaagaacatctatctcaaagcacagggagagctttcttcatgctctccacagaaagctgtttagcctaaatataattccaattgttttctccaatgaactggggaggaatttgaccccactagagatctatctcaatgtctggtcctatgtgtgtttccataaagtgggaaatgcatagtaccaggtactggcctacaagtgactggattagaaagttgggaaagatgacagtcatggacagacagataaaagacattggtggagaacttttatgaaggccacagcttcaagacacaagcttattatattcagaaacttcatcagggatctcaaggcttcccctgccacctatactcacactccacctaaaaagtctagcaagatcaattacagcagtgggacagggctggaaaccctgatggattgtttcaactgtatattcatggctccaagtctgagaggcagggatgggaagatgagatgtgaaagaatttaagatatagccatgactttcattacatccagcaatgcaaacagtatgacttacaaatagcaagacatcttgcattcagggtttacataccttggttgccagatatagcctcctggccttaataaatactaggagacattttgaaagatagcctcctggccttaatagatactaggagacattttaaaagacaagaagcatagtctacagacagaaagtaatcccatacttaggtacagacactgctttgattgaaaatctacttccaggtgaggagaatttataagggattggtgtcctttttgcccattttacaattctcccatgatgcctcttggtccagactttacttcattgtgtttgcaattgcaaacttgatattatctttctttgtaattggcctgatttttcatttttatctttcttcattcactcatggcagatacatgtctaaggattgttaactttccactaggtcattctatctgtttccaaacaattataaaagtcctttaatgctcctttctacctctgagtggcccattgcaatttcccctctttcatctgtaattgcatttatttcagtagcagattaacaatacccaaaatatgaaaggaatctaagttttcattgatgaatagggatggataaagaagtgacacaaacatataaacaatcaaattattaaaattgtaaaaagagatcctgacattaatgataggatcaatgaagttaacattttatactaagcaaaatagagcacagaatggaaatgcttctgatttcactaacaagaaaaattcttttgaaaatcaagtacagtataatttcattcattataagtttctcttgtattttcacttatctttgtgaataaattattccttgttcacttacctattgaaatacaccagacttagtctataacttggctattgtgacaagggctgtgatcatggatgtgacatatttctgtagtgtgttgacttagattacattgggtatattcccaggaatagtatggatagattacatggtatttccatttgtagttttggagtaaagtctgtactgttttccacagtgtaactaatttaactattgggttctactgctacttcattgtctttttgtaacctgagtaaataatttccatattaccccattttgtgaaattgaggctgtcattttgtaagttaaagccttgacaatgtttatatatcatccccatgattttacttagtttttataataaagattttgaattttgttcaaagtggtttatttattcatttattcaagtggttatgtaattttgtcattgattctatttgcatctagtaacatgttaaaatattttaattctttctgtgaaaacatctccattctgacatgtgaaccaattgatgcattgacaaacttgatctgtaaagattgcattgagaatttttgcatctttgtttactatttaagttgatccactggtggtgtgtgtatgtacatgaatatgtacatatgcacatgtgtgttgtatgtttgcttttctcagacctgcaagtgactgatgactgattgaaatgcaacatctctgatatttttttgtctctgctttttctatatttaatttttttcatatattatttttctgtgaactacaggagaatggagatttcagaaaattgaagaatcatcaccaagaattcacacttttcagagccatctctgatatttttaatacgagcattcaactataaatttccatgttaaaattgtctttgcagttctagtgagcagtgttttcatttttatttcactgtaggaagttcataggagaaatttctggccagcctaaccaagctgcagtcaccctgctcaaacaagcccaaataagcatgcatggcagacatttcctccctaaggcctgctgctacacctagagactgttgatgccaatgaggaaagaacaacacagcagagttggccacctgagccaatggtaccttgggggagggtatatgtgcaggcctaacttccttaataaacgagtctgcagcatgctccactactcacccaactcccagtgtctgcatccttgactctgcatcttcttacctctcacccaaggggtgtctgagcagggtcacccacaaaagtagttgttaaatacatgtctaatttcttcaatgacccagtaatcatggtcatgatatgataagtgtaatgaattctttcatgttttgtatttataaagacttcttttatgacaaaaactacaacttattttgtagaaagttccataggattctaggaagcatatacattcagagcttttggatggctatcctatctgtgcaagttaggtccatttaatatgtggtgagtttaaactatgtggtgtcattattaatatttttctctggatttcctttgagatgctaagagctaaataatgaaatatttccatgactgtgatatttgaacctttctaatccttgtgctcagtattatttacagaacaaattagatacacatatatttatgcatgtgtgcatagcatgcacgcacacagacactccatcttcatgtattgtttcattattagtacataataacttttatttccttgatctgggcttgtatatgttattctgattatttttgtgttccatttgcatggtgcatcaacttttttctggaaaaagaaagggtggataaatgattagaaactaaagatgtgagtataaccaatagaattcaaaacatggaagagagaatatcagttgttgaagactctcagaggatatacagtcattgaccaaagaaaatctcaagttcaacaaacccctaaaacaaaatatccatgaaatatggacaccgtgaaaaggcctaacctaagaataacaggtatggaagaaggtgaagaaattcagctcaaagtacagaaaacatattcaacaaaatcatagaagaaaacttccccaacctacaaaagtatatgcctatgaaagtacaagaagcttacagaacaccgaacagactggaccacaaaaagaagtcccctcgacacttaataatcaaaacagcaaacctacagaataaagataaaatattaagaccagcaaaggaaaaaggccaagtaacatataaaagccgaactaacagaatcacaccctatttctcaatggaaaatttaaaagcgagaaggtcctggatagatgtcctatgaacactaaggcagcatggatgccaacccagactactgtaaccagcaaaactttcaatgactatagatggagaaaacaagatattccatgacaaaaccagacataaacaatgcatatccacaaatccagcactacagaaagttctgaaaggaaaactccaacccaacacaaagataactacacactcacaaaaacataggcaatagataatccaattctaccaaacacaaaaagaaacaggagggcaaaattcacacacaatgacaccaccaacaataaatccaaaacaaacaagaaccatcaatcaattggcattaatatccctcaatgccaatggtcttaacctgcccataaaacgatacaggataaaagaatggatacaaagacagaatctttccttcttctgtatacaagaaacacacctaaacttcaaagacaggcgttacctcagagtgaagggttgggaaaagattttccaatcaaatgggcccaagaaacaagctggtgtagcaatccaaatatctaacaaattataattcaaactaaaaatcaatcaaaagagatgaagaaggacatttcattctcatcacaggaaaagtccatcaagatgaagtctcaatcctgaacatctatgccccaaatacgaaggcatccatatttgtaaaggaaacattactaaagctcaaaccacatataaaaccatacacacttatagcaggagacttcaacaccctgctttcaccactagacaggaccaccagacagaaacgtaacaaagaaacaaaggatctaacagaagttatgacccaattgggtttaacagatatctatagaacattccatctaaacacaaaagaatataccttcttctcagcgccaaatggcaccttctgtaaaattgaccacatagttggcaacaaagcaaacccccacaattacaaaagaattgaaataaccccctgtatcttatcagatcaccatgctttaacactagattttaacagcaatacaaattgcagaaaacctacaaactcctggaaattgaataacacccaattgcaccattcctgggttgaggaagaaataaaaaaaagaaattaaagacttcctagaatttaatgagaatgtagacataacatacccaaacttattggacattctgaaataagtgctaagaggaaagttcatagcactaagtgcccacatgaagagagtggagaaaagtcacactagaaaattgacagaactactgaaagctttagagaaaaaagaagcaaactcaccacggaggagtagatgccaggaaataatcaaactgagggctgatatcaataaattagaaactaggaaaacattacaaagactcaatgaaacaaagaggtggttctttgagaagatctacaggatagacaaacctctatccaaactaaccaagaggcagaaagagagcatgctaattaacaaaattagaaacgaaaagggggatataacaatggacacagagaatcatcaggtcatactttgaaaacctgtactccacaaaaattgaaaatctaaaggaaatagacagtttcctggataaatatcacttgccaaaattaaatcaagaacagataagcagtttaaatagacctataatccctaatgaaatagaagcagtcatcaaaagcttcccaaccaaaaaaaaaaaaaaaacaaaaaaacaaaaaaaagcccagggccatatggcttcactgcagaattctatcagaaattcaaacaagagctaataccagtactcctcaaattgttccacacaatagaagcaggagggacattgccaaactctttttatgaggctacaatcactttgatacccaagccacacaaagatacaactaaaaaaaagggaactaaagaccaatatccctcgtgaacatcgatgcacaaatactcaacaaaatattggtgaaacaaatccaagaacgcatcagaaaaatcatccatatgatcaagtaggcttcatcccagggatgcaaggatggttcaatatacaaaaatccatcaatgtaatccaccatataaacaaacaaaaaaagaaaaaccacataatcatctcacaagatgctgaaaaaacctttgacaaaatccaacatcccttcatgataaagatctcggagagaacaggaataacaggaacatatctaaagatgataaaagcaatgtacaccaaaccaacagccaacatcaaactacatggagagaaactcaaagcgattcctctaaaatcaggaacaagataatgctgtccactctctccatatcttttcaatattgtacttgaagttttagctagagcaataagacaagaaaaggagatcaaagggatacaaattggaaaggaagaagtcaaactttcactatttgcagatgatctgatcgtctacataagtgacccaaaaagctctgccagggaactcctacagctgataaacaccttcagcaaagtagcaggatacacaattaactcaaaaaaatcagtagccctcctatatacatatgataaatccaatgagaaagaaatcagagaaacatcacacttaacaatacccacaagcaacataaaatatcttgggggtaatgctaaccaaaaaagtgaaagacctgtacaataagaaatttgagtctttaaagaaagaaactggagaagataccagaaaatggaaagatctctcatgctcttggataggtagaatgtaaaaatgacaattttgccaaaagtaatcgacagagtcaatgcaatccctatcaaaatcccaacacaattcttcacagaccttgaaagaacaatactcaactttatattaaaaaagcccaaaaaacccaggatagcaaaaacaattctgtacaataaaggatcttctggaggcatcaccatccctgacttcaagctctattatacagacatagttctgaaaaaagcttggtattggcacaaaaatagacagatagaccaatggaatagaattgaaaaccctgttattaatccacacacctatgaacacctcattttttgacaaagatgctaaatctatacaatggaagaatgatagcatcttcaacaaatggttctggcacaactgggtttggacatgcagaagattgcagatagatccatatctgtcaccatgcacaaaacttcattgcaaatgaatcaaagatctcaacataaatccagccacactgaatattctagaagagaaagtgagagaaacccttaaattaattggcacaggagaccatttcctgaacattacaccagtggcacagacattgagacctgcaattaataaatgggacctcctgaaactgagataccacctcacacctgtcagatggctaacatcaaaaacaccaaacacaatctatgctggagaggatgtggagaaaaaggaacactcctccattgctggtgggagtgcaaacttgtaagaccactttggaaatcagtatggcagttgctcagaaaaatgggaatcagtttacgtcaatatccagcaattcctctcttgggcatataccaaaataatgcatggtcatacaacaaggacatatgttcaaccatgttcatagcagcattgtttgtaacagccagaacctggaagcaacctagatgcccttcaactgaagaatggatagagaaaatgtggtacatctatgcaatggagtactactcagcagaaaaaagcaatggaatcttgaaattcacaggcaaatggatggaaccagaagaaatcatcctgagtgaggtaacccagtcacaaaaggacaaacatggcatgtactcacccatatgaattttagacatagagcaaatgattaccagcctacaatcctcttcatcaaagaaactaggaaacaagaaggactctaagggaaaaatgcatggatcccaggaataggaaggggcaggaactcctgagctaattgggagcatgaaggtattggagagggagctgccagaatgagaggagaagaggagaggaaaggaggaatgggggagcagaaatattgagttggtggacgaatacaggagagcaggatgtgagataccatattagagggagccattataggtcggaggagagatctgacactagggagatttccagagacaaggatgacacgaactgacaatccaggcaatggtagagaggataacctaaatgcccttcctctataatgagactgatgactactttttataccatcctagagccctaatccaatggctgatggaagcagaggcaaacatccacagatatacactgaactgaactctggaacttagttgcagagagggaggaatgaagatcaaaggagtcggtatcaggtttgtgaaacccacagaaacagctggcctgaacaacggtgaacacatcaaccccacactgctatctgggaggccagcatgggactgatccagacccctgaacatggatgtcaatgaagaggcctttgcactctaggaggccactggtagtggattagtattttccctggtgtaagaagggactttgagagcccatcccacatgaagggatgcactcttggcctggacacatgggggagggcctaggcacagcccaggatgatggggtagactttgggtagcccctgtggagggtcctaccctgcctggggagtggagggtggatggggataattcgaactaataaaaaaagaaaataaaaaagaagtgtatgttttttttatttaaattagaaacaagcttcttttggttcaaatactatttgttcttctttttgttgttttatatgtttgcttgtttaatgagttgagcacaattgattatttttaattatcatttgttcctcttctgaaacacaaactttccaaggttcttatgagggtgtctgtcttcagtccttttctggatataagatttcttacagtatctcccacagttctgaattagttgtcatgaattcctttgatctatgttgatcttacaaggtctctaaattttccaaagactttaaacaacaattagctaattgtaattatggctggaagttgttttgtttcagggagttgttttatttccaagttttaggatttctttcttggatttcagggtttctattgagaaatctaatgtagctcttgacattgtaaatttgcatttgtctcttgtagtgttcaatagtctcttgctgttctttttgtgtctctgtctttgtgtgtgaaagtgttttctttttgtcttttctttttatttaaactagaaacaagcttgttttacacatcaatcccagttctctctccctccccttctcccctgccccttaccaactcccctattccattccctttctgctccccagggagagtgaggccaatccggggggtcttcaaagtctgacatacaatttggagcaaggccttggccctcccccacgtgtctaggctgagacagtatccctttatgtggaatgggctcccaaagtccattcctacattaggaataaatactgatccactacaaaggccccattgattgcccaggcttccacactgacacctacttccaaggggtctggaacactctatgctggttttccaactatcaatctggggtccatgagctccccctttttcagttcagctgtgcctgtgggtttcttcagcctggtcttgaccccttcactcatcacacctccatctctgcaacaggattccaggagttcagcaaagggtttagctgtgggtgtctgcttatgcttccctcagctactggatgaaggctcaaggatggtatataaggtagtcatcaatctcattatcagaaaagtgcatttaaggtagcctttccactaatgcttagattgttagttgggggcattcttatagatctctggacatttccctggtgacagatttccttttaaacctgtaatagctccctatattatgatatctcttttcttcctctcctctatcccaccctgaactcaatctcctagctccctcatgtcctcctcttccttcctcttctccctttctctttctcctaactccctctctcctcccccacgctcccaaatagctcaggaggtcttgtccctttccctttctctaccatgtatatatctcttagggtcctccttgttgcctagcttctctggcagcatggattgcaggctggtaatcctttgctctatatctaaaaacaatgtatgagtgagtacataccatgtttgtctttgtgactgggttacctcactcaggatgagttcctctagttccatccatttgcttgggaatgtcaagattccattattgttgttgtttttttaatttagcatcttagctataatgtgtagctaatggtttttttctgatcacatttatttgtgtattgcatgcctcttgtatttgaatatccctgctttcccttcagtttggaggattttgtactacaattttagtgaagttgatttacctgcattgagtttgtatttctgagtgtgtatatgtacaaaagggattcttctgttaggtcttttcatccaagcccacagttcttgagattgtagtcatgactgcaaaaattcttagggctggcagcatgtaagtctaaaaagtcttaggccttgtttttgatatctgatatttttctacttcctgtagtaaattgttgatgttaacattgagtttctttgaattattgatatattttccatgatttctaaaatatttatgtatttttgtagtcatgcattccttgatctacttcttacctaagttattgaatttctgttctaagttttaatattcttacttcattaatctgtttacttatggtttcttgtaattcaatgaccattatgaaaatgagactttttaatacacagtccagattttcaactgtttcaatacttcagatattgagtatttatgaaaatattaggaatctcaggtatttacatgtcctatgctacaattttgcagatattagtatctgcatacaatatctcttgcaaatgttaatggggttcttttagtaggcaaccttcttttatttttacaaccttgattaatacctaaaggagtgaaagcctacagccgtaataaaaacaaatatgtaaaataaaactaaatatttttcttttttacttgaattataaacaatcttattatttttttgttttctgagacagggtttctctgtgtagctttggaggttgtcctgggactagctgtgtagatcaggctggcctcgcactcatgcactcatagagatctgcctgactctgtctcctaagtgctgggattaaaggtatgtgccaccaacgcctagctgtaaacaagcttcttttacatatcagtcttagttccttatccctcccctccttccctgcctcctactgacccctatccaaactcctttcagctccccaaagggggtgaggccttccatgggggaaatcttcaaagtctgtccataccatttggaacagggatgaaaccttccccagtgtgtctatgctaagacagtgtggaaagggctaccaaagtacatttgtatactaggggtaaatcctgacacactaccagtggtcccatagtcagggctccaaacagacttctggcttcagggggtgtagaacagtcctatgctagttcctaactatcagtctggggtccatgagctccccctttttccggtcaactgtttctgtgggtttctccagcctggtcttgacacctttgttcatcactcctccctctctacaactggattccagagttcagctcagtgtttaactgtgagtgtttgcttctgcttccatcagctactggatgaaggcactaggatggcatataaggtagtcatcaatctcattattggagaaaggtatttaaggtagcctctcaactattgctaagattgttagttgtggtcattcttgtagaactctggtcatttgcctagtgccagaattccctttagccctataatgactccctctttgatggcatctcttttgttgctctcctctattcttcccctgactagatcttcctgttccctcatgtcctcctctccccacctcttctccccttctccttcttctaactccctctcccatccccaaatgctccccattacttaggaaatcttgttcccctctacttcttccagggactatgcagtcttctcttggggtcctccttgtttcctagctcctctagcagtgaggattgtagactttgttctatgtctaaaaatcatgtatgagtgagtacataccattttttgcctttttgtgactggtttaactcactcagggtggtttcttctagttccatccatttcctgcaaatttcaagattccattgttatttcctctgctgagtagtactccattgtataaatgtaccatattttctccatccattattcagttaaggggcatgtaggttgcttccagcttctggctattacaaataatgctgctatgaacatggttgaaaagatgtccttgtatgaatgtgcatctttgggtatatgcctaagaatggaattgctagatcttgtggtacattgattaacatttttctgaggaacctccatacagatttccaaagtggctgtacaagttgtcattcccaccagcagtggaggagtgttccccattctccacatcctttccaccataaactgtcattgttgttttcgattttaaccattcagacagtaataagatggtgtctcagagatgttttgatttgcatttccctgatggctaaggatgttgaacattttcttatgtgtttttcagccattttagattcctctattgagaattgtctatttagttctataccccactttttaagtggattagttggtgttttggaaactagcttcttgagttctttgtatattttggagatcagccctctgtcagatgtggggttagtgaatatcttttcccattcagtgggttgctattttgtcttgctgactgtttcctttgccttaaagaagcttcccagtttcaagagctcccatttattaattgtcaatctcagtgtccgtggtactggtgttatgtttagaaagttgaatcctgtaccaaatcgttcaagggtaccacctaacttctcttctaagaggctcagtgtgactgaatttatgttgaggtctttgatacatttggacttaagttttgtgcatggcaatagatatggatatatatgcagtcttctacatgtcagcatccagttatgccagcacaatttgttgaagatattttcttttatttcaattgcataattttagcttctttgtcaaaaatcagggggcagaccactggcatcaagtgtccctatgaattttgagtctttaaagaaagaaattaaagaagatgacagaaaatggaaggatctcccatgttcttcaataggtaggatcaacatagtaaaaatggcaatcttgcattgtgcgtgggttaatacctgtctattttggtgccaatagcaacatgttttcatgaatatagctctagagtagatgttgaagtcagggatggtgaaacctccaaaggttcctttattgtacagactgggttagcctaacctgagtctttgtttttccatatgaagttgagaattattcattcaagtacctttaagaattgtgctgggattttgatagtgattgcattgagtgtgtagattgcatttggcaaaattaagagaaaatattaagatcaaggtcaaataatatataaaggcaaaactatgagaattacacctgacttttccatggaaactctgaaagccagaaggtcctggatagatattctacctacactaaaagaccatggatgccagcccagacaactctacccagcaaactcaatatatatggtgaaaacaagatattccatgacaaaaccagaataaaacaatacatatccaccaatccaggcctacagaaagttctggaaggaaaactgtaacccaaggaatttaactacaaccagaaaaatataggcaatagataatcccactttaccatcagacaaaaggaaaaagggatggaatcccacaaataatttcaccaccacaaccaaatcaaaaaaaagcaagaatgagcaatcaatggtaattaatatccctcaatattaatggtattaactcgcatataaaaagacacaggttagtagtatggataagaaggcagaatccatccttcttctgcatacaagaaatgtacctcaacttcaaagacagatggtacctaagaattaaaggttggaaaaagatcttccaatcaaatggacccaagaaacaagtaggggtagcaatcctaatatccaacaaattggactttaaaagaaaataaatcaaaagagttgaaaaacatcacatccgactcatcacaggagaaatccatcaggatgaagtctcaattctgaacatttatgccccaagtacaaagaatccatgtttgcaaaaaaaaaaaaaaaccaaaaaacaaaaaacattactaaaactcaaatcacacataaaaccgcacacagttatactgggtgacttcaacacaccacttttaccactagacaggaacactggatggaaacttaacaaagaaacaaaggaactaatagaagttatggcacaattgagcttaacagataactatagaacattccatccaaatacaaaacaatataccttcttctcagcaccacatggaacctattctaaaatcaaccacttacttggcagcataccaaacctcaacaggtacaaaaatattgaaataaccccctctattttatcagaccaccatgctttatagttagaatttaacaacaaaacaaattgtagaaaacatacaaactcatgaaaattaagtaacagtcaatttcacaactcctgggaagaggaagaaataagaaaagaaatcaaagatttcttagaattcagccaggcattggtggcacacacttttcatccaagcactcgggaggcaggggcagatggatatctgtgagttccaaaccagtctgatctacaagaactagttccaggacaacctccaaagtcacagagaaaccctgtctcgaaaaacaaagacaaaaacaaaaacaaaaacaaaaacaaatgatttcatagaattcaaagagattgaggacacaggatacctgaacatatggaacactttgaaagcattgctaagaggaaagttcatagcgctaagtgtccacacaaagaaataatcacactagagaattaacagcaatactgaaagctttagaacacaaagaagccaatacaccccagaggagcagatgccaggaaaaaatcaaattgagggctgaaagcaataaaggagaaactaggaaaacaatacaaagaatcaatataacgaaaagttgcttcctccagaaaatcaacaagataaacaaacctttatccaaatttaccaaatgggagagagtgaaaaagcaaataaataaaataagaaatgaaaaggggacataacaacagacacatagaaatccagagaatcatcaggtcacactttgaaaacctgtattcctcaaaattcgaaaatctaaaggaaatagacaattttctagacagatttcacttaccaaaattaaatcaagaacagataagcaacataaatagacctataacccctaatgaaatagaagcagtcatcagaactctcccaagcaaaaaaagcccaaggccagatggcttcagtgcagaattctaccagaaattcagggaacagctaaaaccaatttgcctcaaagtattccacataatagaaggagaagggtcattgacaaactctttttatgaggcttcaataaccttgatacccaagccacacaaagacacaaatatgaaaaagaactacagaccagtaaccctcatgaacattgatgcaaaattctcaataaaacactggaaaattgaatacaagaacacatcagagaattcatccagcatgatccagcttcatcccagggatgcaaggatggttcaacatatgaaaatcaatcaatgtaatccacaatataaacagactgagaaaaaaaaaccacatgatcatctcactagatgctgaaaatgcctttcacaaaatacaacaccccttcatgataaaggtcttggagaaatcatggatagcaggaacatacattaacataaaaatgcaatatacagtaagcctacagccagcatcaaattaaatggagagaaactcaatgcaattcctctaaaatctcagacaagacaaggctgcccactctctccttaccacttcaatattgtccttgaagttctagcaagaagaataagacaccaaaagaagatccagggaatacaaatcagaaaggaagaagtcaaactttcactatttgcagatgatatgatagtctacataagtgacctgaaaaactcaaccacggaactccaacagctgataaacatcttcagcaaagtgtcaggatagaagattaactgaaaaatatctgtagccctactatatacagatgacacattcatagagaaagaaaacagacaaacatcacactttacaattgccacaaacaacataaaatgccttgggataacgttaaccaaacatgtgaaaacactgtactgtgagaattttgaatctctaaagaagaaattaaagataccagaaaattaaagagcagaaaattctttctgctcttggatgctcttggaaaggtagaaacaacatagtaacaaatggcaatcttgccaaaagcaatctacagattcaatgcaatccccatcaaaaacccaacacaattcttcacagaccttgaaagaacaattctcaactttacatggaaaaatcaaaagacccaatatagccaaaacaaccctgtaaaatacgggaacttctggaagcatcaccatcgctgacttcaaactctattacagagctatagtcctgaaaacagcttggtattggcacaaaaatagacaggtagaccaatggaatagagttgaaaaccctgatattaacccacacacctatgaacacctgatttttgacgaacaatcaaaatatatacgctggaacaaagtgaacatcttcaacaaatggtagtggcataactggatgcggacatgtagaagactacagatagatgcaagcctttcaccctgcagaaaacttaagtcaaaatggatcaaagacctcaacataaatccagccacactgaacctttagaagataaagtggggaatacgattgaattaattagtacaggagactgcttactgaacattacacccgtagcagagacactgagatcaacaattgaaaaagggaccctgtgaaactgagaagcttctgtaaggcaaaggagacagtcagcaagacaaaacggcagcccacagactgggaaaatatcttcaccaatcccacatctgacagagggctaatcttcaaaatatacaaagaactcaagaagctagtctccaaaacaccaaacaatccaattaaaaagtggggtacagaactaaatggataaatctcaatagaggaatctaaaatggctgaaagacaaataagaaagtggtcaacatccttagccttcaaggaaatgcaaatcaaaacaactctgtgattccatcttattcctgtcagaatggctaaaatcaaaaacaccaatgacagtttatgctggaaaggatgtggagaaaggggaacactcctccaatgctgctgggagtgccaacttgtacagccactttagaaatcagtatggtgaatcctcaattaaatggcaatcaatgtaccacaagatccagcaattccactcttaggtatatacccaaaagaagcatattcatgcaagaaggacatctgttcaaccaacttcatagcagcactatttgtaatacccagaaactggaagcagcctagatgcccctcaacttatgaatggatagagaaaatgtggtacatttacccaattgagtactactcagcagaaaaaaaaaatggaaccttgaaatttgcaggaaaatgaatggaactagaagaaaccattctgtgcgaggtaacccaatcacaaaaagaaaaacatggtatgcactcactcatattggattttagacatagagtaaaagacaaacagcctacaattcacactgccagagatgctagtaaccaaggaggaccctaacagagatatacatggtcccctggagaaggggaaagggaaaagatctcctgaataaattgggagcacaggaagaggggggagggagctaggtgaatgaggagagaagaggaggggtgaggaagacatgagggagcagaaagtttgtgtcaggggaaggatagaagaaaacaagaatggagataccataataaagggagacatttgaggtttccagagaaatcaggtaatagggaaatgtctggagatctgcaaacatgacaccaactaacaatctaagcaacagaggagaggctaccttaaatgccctcccctgataatgagattgatgactgacttatatgccatcagatagccctcatccagcagctggtggaagtagaagcagacacccacaactaatcactgaactgaactgtaatccagatgcagagaaggacgagtgaagagcaaaggggtccagaccaggctggtgaaacccacagaaacagctgccctgaacatcgcagaattcttgctctgtagactgatagctgggataccagcatgggactgatctagaccccaggaacatgggtgtcagtgagaaaacctctgaaatctacaggacctcctgtagtagttcagtacttatctgtatcataggtgtggactttgggaacccattccacatagaggaatactccccgagccaagacacactgggttgggcctaggccctatcccaaaggcatacaggatgcttatgaagcccctctagatatgattctagtgagggtatttatgctaactcacagcctcaggctgaatatgaagaccatatactgtccatatgcaggaaagcagcattaaacacctgggataaggttcgtgagccaggagaacacctagaatcttataacagaatagaacagggacctacagaacagttctaggactttttacagaggttaactagggcattagaattacaggtaacagatctagaaactagaaaattaattgtatatacagtagcttatgaaaatgcaaacccaatatgcaaagagtacttttgactttaaagatcagatcagctctgctagaagaatgggttttgtatgcaaccaacattgactataatgtgcaagatactggagcttgggtaggagaagccatcttgaaaggtttgaaaaggcaatcggagattaaaagttctagaggtgaggatgcaagggattgggaaggagaagcaacttacagaggtcaacataggtaccaagaagttagatgttactactactatgaaccagaaccttgggtaggaagagccttcctcaggagaccaagaaggcaccaggaacctagatgtttcagctgtggtagaatgggacatatcaagagaaattgtagacaaaagatttctaacaatgactcatacagaaggccactgccttctggattgtgtagaagatgtggtaagggctgacactagaccaacagttgtagatagatcatggacatgaaaggaaaccggttaaggctgggaaacactgaagggggcattaagaagtccccacattgagaaagttccggtcattcccagtagcagtggaagacaatctctcataggacgaatagataattctttgcctattgtgaaaaatgatactgctctagatggtggatagtgatgaagaatcaaatgtgaatggccaaaatgagaaatgcatactttggcaaacttctattaatgataaaagacctcagttgaaattgaaaattaattatacagttactactggattagtagacactgaggcagattgactattattaccgaaaagtcttggcctcagaaatgaccacttagagagtcaaatgtacaatttttaggaattggaattctatctagagttcaacagagtgttaacttggtggtctgtattggaccagaaggacagacagggagattgaaaccatatgtggcagatatagatgtaaaactctggggtcgtgatcttttacagcaatggaatactcagattaatattcctccagtgtcatatacaaattatgtacaatctttatatactagaaaagatctggtaagacgctatggaaaatggttaccaaccatccaggctgtatagaaactaaatacaaatgacagaccttcagaagtgccaagggccctgccgatgaagtggcttacagatgaacctgtttgggtaggtacaaattagaaggcattgatatcaaactcttaattctcttcaaaaagtattaggggaaatttctcaactacagacgattattggtgaagaaggacataaatcaaatcattgaaaatgacccttaaatgtgataaggacctaaaaagtctgagaatattatctgctaagcaagaaaaagagttacaatgggtagaaaaaagaatattggatgcttatgtagatcagataaaccttaatatttatactctattctggttatcttgccatccagagaatacccttctgggtttctgatgcagaaggaagacaccatattggagtggatatttctgccacataaacagaataaaaagttaaagacatatatagataaaatttctgatttgattttaaaaggcaaattaagactttgtcaccggactggaaaagattcagcagaaattatagtacctttaactaatgaggaaatttcctccttgcggaaggataatgaatattgacaaatagctcttactgacttttggggaatgattagcaaccactatctcaaaactgacagaattaaattcacaaaaaaaagacagtctggattcctggatatctgtaagttccagagcaacctggtctataagaactaattcttaccatttacactgatgccaacaaataaggtaaggtaggttataaagcaggtgaggtaagtaaagtagctcaaagtccgtataaatctgtacagaaggcagaattatatgcaatcctcatggtacttatggattttacagaacctcttaatatagttactgattatcattatacagagagagtcaggttatacattgagactgcacaattcgttcttgataatacagaattaacttcattgtttatacaattacagggaacaatctaaaacagaagtaatcctatatatattacacatatcagatcccatacaggtctgcctggcccactagcccaaggaaatgatgaggttgattgtttattaattggaagcttactagaagcctcagaatttcataagaaacatcatgtaaatagcaaaggtttgaaaaagacttctccattacttggcaacaagccaaggagatactgagaaactgacctacttgttcttttaataatcaaactccattggcagcagattataatccgaagggcatttggagaaatgaggtttggcagatagatgtctttcactttgcagaatttggaaatttgaaatatgtgcatcatactatagacacattctcagggttccagtgagctattgctcttaactctgaaaaagctgattctgttattatacacctgctagaggtgatggcagttatgggtatacctgcacaaataaaaactaacaatgctccagcatatnnnnnnnnnnnnnnnnnnnnnnnnnnnnnnnnnnnnnnnnnnnnnnnnnnnnnnnnnnnnnnnnnnnnnnnnnnnnnnnnnnnnnnnnnnnnnnnnnnnnnnnnnnnnnnnnnnnnnnnnnnnnnnnnnnnnnnnnnnnnnnnnnnnnnnnnnnnnnnnnnnnnnnnnnnnnnnnnnnnnnnnnnnnnnnnnnnnnnnnnnnnnnnnnnnnnnnnnnnnnnnnnnnnnnnnnnnnnnnnnnnnnnnnnnnnnnnnnnnnnnnnnnnnnnnnnnnnnnnnnnnnnnnnnnnnnnnnnnnnnnnnnnnnnnnnnnnnnnnnnnnnnnnnnnnnnnnnnnnnnnnnnnnnnnnnnnnnnnnnnnnnnnnnnnnnnnnnnnnnnnnnnnnnnnnnnnnnnnnnnnnnnnnnnnnnnnnnnnnnnnnngagttgaaaaggaaaaacctcttgacgaggagaaatgacaggtattctattaaagcatatctcataaactaaaaagaaacctcccaaaggagagggaagtgttttgtttttatcttcacaggaaaactcattgccagaagtcaaaggatactgcatgggtagatatttaagaagagaaggtagctataaccatcaaacaaaaggaacagtaacatgccattacagtaaactttatagctgtttctcaaacgactctatttctctttatttcctagtccctattcaattaaaccaatgctggctttagaggtggatttggctttcctcctctaaaatccaagcatgttgtttaactaaacctcagagtttcaatattatatcaagaagccaattgatgtaatacagaataagaaaaaaatttggggactgtctttgtcttttcttggctctttgttcaaggtgtacaccctctcataattgttatgctcccattgttgccttttctagtatacattcttacacaaacatttctctgctgacattatgtttgagtcccacacagccaatgaagacctgcctgacagaaaaccctggattccccagaaagaaaatgggccatacctccttgactgcactggatccaacttgctccatttcaactgacactctggccaaagctttgagtgctgacttcaatcaagtagaggatttcaatcaagatcttcaatcaagcaaatcccatctaacatggactggatacaacccattcaagactttcactacactaacattttcttcctatagtaccccacaaggctattgccctcccgttccagcaggaagtatcttggaggatgctatgctccctttcccccattgttgtcatttaggatatgtacctagttagggatagcttcctattgtttatggttgggattggaaggaggtgttcaggcttggacacatctttcagatgactttagagtttaattaaaatagacataggaagtgattgaagcagattgttgtatcttcttacatttcacctttatgattgctaattttggatacttcacactgttaagttttaatcctcttttagactcaaagggtaattgtagcagatgctgtagtcaagcctgcttaggggctggctacaggtgtgcctgaccacacctgtgagggcgtggtcagggtgaggtagagcgagggacgcttacgtggtggcatgctttcgctttcgtctttggtttgctgtatggactgctgccctgctggctggctaggtcactctgtaagtaaggctttccctattaaattcccttgtatttttacctgtctctgtattggtaattccccacattaatcatgtagttattctttctcagtctgtttatatggtgtattacattgatggattttcatatgttgaaacatccttgaatccatgggatgaagcctacttgatcatggtggatgatttctctgatatattcttggattcaatttgccagtgtttcactgaatattttgcattaatgttcatgagtcatattggtcttcagttctccttcttgattgtgtcttagtgtggcttgggtaccaagataattgtagccttgaataaagagtttggcaatgacccttctgcttctgttttgtggaatactctgaggagacttggtattatctgttctttgcatttctagtagaattttgcactgaagccatctgaccctgggcttcttttggatgggagacttctgatgaattcttctattttattaggagttataggtctatttaaatagcttatctgttcttgattcaattttggtaagtgaaatctatccagaaaattttccattttgtttagatttttgaattttgaggaatacaggttttcaaagtatgacccgatgattctctgcatttcctctgtgtctgttgtaacatccccttttcatttctgattttattaattttcatgttcacttcctgctgtatggtatgtttggataaaggtttgtttatctttttgattttctcgaataaccaactctttgttatattgataattttgtattgctttcctagtttctactttattgatttcagccctcaattttattatttcctggcatctactcctccaggttgagttggcttctttgtgttctagaactttcagttgttttgttaattctgtagtgtgattattctccagtttcttcatgtgggcacttagtgctatgaactttcctcttagcacactttcaaagtgtcccataattctggtatgttgtgtcctcattctctttgaattctaggaaatctttaatttcttttttattacctcattgacccaggaatggtgcaattgggcattattcaattaccataagtttgtagggtttcttcaatttgtgttgttgttgaattctaactttaaagcttggtggtttgataagatacaggggtttattctaattatttgtatctgtataggtttgccacattgctgagtatgtagtaattttatagaatgttccatgtggtgctgagaagaaagtatattcttttgtatttgatggaatgttctatagatatatgttaaacccaaatgggccataacttctattaattcctttgtttctttgtttattttatgtctggtgttcctgtatagtggtgagagtggggtgttgaagtctcccaatataagtgtgtgaggttttatgtgtgatttgaattttagtaatacttgtttatgaatgtggatgcctttgtatttggggcatagatcttcagaagtgacagttcatcctgatggattttcctgtgatgagtaggaagtgacatccttcatctcttttgatcgattttagtttgaagtctaatttgttagtatcagcattgctactccactttgcttctttgacccatttgattggaatatcttttcccaaccctttactctgaggtactgtctgtctttgaagttgaggtgtgtttcttgttgtatgcagcagaaggatggattctgtctttgtatccattctgctagtctgacttttagacattttatggccattaattttgagggatattaatgaccattgattgttcattattgtttgttttggatttgtttgtggtggtagaattgtttgtgaatttccaccccatttttcttttggctgttggtaaagtgggattatctattgcttgtgtttctctggttgtagttaacttccttgggatggacttttcattccagaactttctgtagggatgtattggtggatatgtattttttaaatctggtttgtcaaggaatatcttgttttctagatctatattgattgaaagctttgctggttgtagtattctgggatggcatctgtggtctcctagtgtaggtagagtatctatccaggtccttctggctttcagtatttccttggaaattcaggtgtaattctgataggtttccctttatatattacttgaccttgatcttaatattttctcattattctgtatgtttggggttttgattattatgtggtgaggagacattttttgtggtccactctattgggtgctctgtaggctttttgtactttcattggcatgtctttctttatgttgggaaagttttcttccatgattttgttgaatatgtttttgcacctttgagttgggtttcttcaccttctatacttactattcttaggtttggttctttcacagtatcctatatttcctggatattttgtgttagggatttgttggacttaagattttctttggtccatgagtctatttctactagtgtatcttcagtgcctgagattctctcttgcatctcttgtattctgttggttatgctttgcatctgtagttcctgcattccctcagattgtgctttctttattgtttgtatttcagtttttaagtcttgaactgtttccttaagaggtttgttgatttcttggggtgttttctttttcttccatgtctttaagatgtttctcatatcttctttgaggccctctatcattttcattaagttgtttttaaggtcattctcttctgcttcacttgtgttatgatgttcaagtcatgctgatgtagagtccttagactctagtggtgtcatattcgtttttctgttattaaatatgtttgtatattttcttcttcccatcccttcttctggtgggtatataaggagtctcttcctctctgggtggttacaggaccaagctttccttctggtgggtgcacacagctgcaaaacattgatgtcgctcctcttcccatggatggaggcaggactgggtctctgggtgggctgcatcctacctagatgggatctgcagtgagcagtccccaggactcaggtgtatctgagcagtgcagaggaaggcaggctggaaacagacccaagcttaactagtcctgtggacagaagaagggactaggaccctgcagactctgggtgggctggatgctgctggaatgggatccaaacagggtgcagtcccaggcctcaggtgtctccaaggacagaaaccaaggcaggtgggccagacacaggcccaagcatacctagttctatggtggatggaagtcagactggtacctgggccttggcagtctctgggtgagctggatcctgctgggatgggggtatgctgtgagtagtccccaggcctctaaaagtagatatttaaacatagttgaaaactatcaactttactcacagtaagatttaatgcaaaggaatgagtttgcttatataattaataggagtttaaaaattgtcaaagttttggtcttttatataaggaatttatatttaaaagtaaaaaatatataagaagggaagaaactatggggaggaggtagacaactgagatggaggaaaggagaatggggaagataatggaaggaggatatgagggaagtgtagtggtattgatgtaaaaatgccatagcaaaacctattacattttatgctaactttaaacaattaacataatcagttaaaattataaacaatgaaagcgttaatagttaagtgacaaaaatggggttggaaaaggaaagagagaagaagcaagatgaaatatgtatgaaggaatgaaggtagaatgtagatgaaagtaggaaaacattattttgtgggtctgaaaaataaaacaatacagaacaatgcaaatcctgaggctggttaatcttcttctctggggagatgaagtcagaagtctccaggcttttctcaacatttttaattactagaagtgaatgtggagtgagaggaaacatctaagtgggttgggctagaaagggctgttaccatgcatgcacattactgtgagcactgctgaggtgagtttgttctagtgcttctgtattcagatataggaatgtagggggatcagagaccacttttcatcattctcacaagctgaacctgagggtttccaaactgcatgccctgtcacacaatgtgtgtatggccatgagaaataccctcaatacccaatgtctttgacattctaagaatgtagaattcaagccaaagcaagttgcatggacaggtaaggcaatggccccgagaggctcctcacacatagctgttctccccagaggtcaggttgaagttatggaaatacagcatccctcagctatcttttgtactgcagtctccccacactccacctcaacaaagccgtgctgagggtcagtgtctgagtcacatctacttcctttagctctgacggtatttcagggtgttctcttgcttagctagtggagatgaggatgtctggaatttggagaaataaaatgtaataaaggtcttctactttcctaggtaaaaggcttgatgataaaacccttccaaaatgactttccatagcagtatcattacacatgtgcttccaagtaatgggagaggtccttctgtatgctgtgaatatatgtttctattattggttgatgattgaagctggttttgctaatggataggcaagatgtagcaggcaggaagtataggcagggctaccagactaggggaatgcaggcagaagaaacacagagagttgcccaggagatgccatgtagctgctgaagtagtagcatgctagagcattatggataatttacagccttgtgacaatacatagtttaatagaaatgggataataactaagaaagaactagccaataaaaagtctgagccattggccaaacagttaataattaatataagcctttgtgtgtttacttgggactaaaaagctgtggaaccaggagaaacagaaaattatgtcatcaaatgatacccaacttccatcatcatcacagtgctacaatgttgatggatttcatctaggcagcaatttctctttttgtgatgcccttttctctttcnnnnnnnnnnnnnnnnntgacaccttatgttagcgtctactgagtccatttgagattgctttgtgaatatgaacatacaaatatgtaacaataatagttataaaaaagaagagattatgaacttgaggagtggggatgacatgggaagaattggaaatggggagggatgaatggaaatgatgtaaatatgatacccatgaaattctaaaacataatttaaatggataaaaagaaaagataaaacaggaatactaatatgacagttcttgacttggatgctgtcattgtgctgaatatactgtcatttgtagcagaaagtaaattgatctttattttatagttcaaaaaattatactaaccatgcttcaaaccacaaagaattatagatcataacacccaaattttaacttgttttatagtccatcaggatgggaatatcaccttagggtacaatttattttccttatcataaaattctgccaccattagaaacttcatataaataaaaaaatgagccccctgcagaggtaatgaaagcaaattcattcaatcttccttctgatgtgtcattctagctcttttgacagctgaaaatactaaattgcaatcaaatgcctatagcacaggagtgaaaaatgcaagcattaagcaaatttctttacatgaaataattaacagtgtgtaaagattcaactcagtggtttataagatgtaagaacatgatctaaaacaatttagaattgcaaagcataagaagcatatgtcatgaggctgactgaggaaatggactcacatgctctccgttttgtttgtcttttccaaattcatttacttttaagggaaataaaaatgcacttatagagatagctatgtggttaacagtaccttgtgttcttgaagaggacctgatttcacttcacagcacctagtctgggcagctcacaagtgtaggtcactccacttccagggaaccagacattatcttccaacttcagagaacaccctcacatatgccagacactcacacagatacacacactaaattaacaaataaataaatctcgtttatcaagaaatcaaaacacaatgcacattatgacttataaaggatgaccttagtctttcttctctgatgacatgtagaagtgacaaccttgctctctaggcataaacaactttgcatgtaagaagtaggagaccagactacctcaagatccagcaattcctctcttgggcatatacacaaagaatgcatattcatacaacaacaacatataatcaactgtgttcatagcagcattgtttgtcatagcctgaacctggattcaaccaagatgcccctcaactgaagaatggatggagaaaatgtggtaactttacacaatggagtactactcagcagaaaaaaagcaatggaattttgaaattcgcaggcaaatggatggaactagaagaaaccatcctgaatgaggtaacccagtcacaaacaaaacatgagccttcatccagtggctgattgaagcagatgcagacactcacagctaaacactgaactgaactctggaacccaactgcagagaggtaggagtgaagagcaaagaggtcgggaccaggctggtgaaacccacagaaacagctgacttgaacgagagggggtgcatagatcccagactgattgggaggccagcatgggactgattcagacccccctgaacatggattttagtgaataggcctcagcactctatggggcctctggtagtagaccagtatttaaccgtgatataagaaagggctttgggagcccatcccatttggaaggatgctctctcagcctggacaaatgaaggagggcctaggccctgaccagaatgatatgacagacttgtgggtatcccacatggaggggcttaccctccctggggagcagaagggggatggggagggaattagtgaagggaggggaggaggggagggaaatggagcaaggattgacttgtgaagcaggcttgtttctaatttgaactaataaaaaataatttcttagaaaaaataaagaagggaaaaggaagacaaagatatagaatacttttaaatgaaccacttaatttagttcggccattcctgaagtaattaaaattctacacaaggcattgcaacaccaatgtgtaaatgaaaaagtgatatgaatgttcttaaagtttatattaattctgacatgttaaatttattaaatatacagatagaattgaaattaaggactgaagaagaattgtcccctatttgttgttgttgtgtgtgtgcatgtgtgtgtgtgttatgtgtgtttatggatgtggggtgcattcaaaggcaaaagacaacaaaatatacaccttgtattttaaagtggcctagaacttgctggcctagaacttagtatattaagacaggttagatgactagccatgcccagggatctgtctatatccacttacccagtgatgggattacaatatgtgcactgtatctggatgtttctatatatgtgggttttagacatcagtctcatatctccatgtgtatgaactttaccagcatcccacagccaaaacagctgtttgcaataatgcactcaacaacatattaaccctgagttttctagtaatctggatcctttaagcataatctctgaggaatgaaatggttacacttggggacttgagagacaatggctagacataaaattttactccaggaaagatgatctatcatagactaatgggaccacttctctatttcaaaagttacatttaatattagcaagagaaaaaaattcaccacaactgataaagtgctgtaactaaccccacacattttacaagaataaaagaaggtatgcatacttcacagtgtgctttaaatgtacaaaaaaagtcaaaattattactttatttgcaacagaaagtaaacataaaacctgaggggttttttttgtttttgtttttgtttgttttttagattttaccatggagaaagtggtaggtggtctataggaaatcacacctggtatttcccaacaaccatccttttgaacaacttttctttgttgccacccatgtccatgattcatatgtctaaagactacatttccattggagtaaatttctcaagacatctactattttgaatctcctgtcttactgtgcttgtgctccatctgtatgtcagaagctcctgattaatttcattacatggcccaagggtgaagcagatgtttttgttgattttatttatttgttttcatctttgtgccttctgcaatacaattcacaaaaacagaatgctgcaaatgcttgcttaccattaggaacgaagagttttcaaatagatttttactttagtatcttataacttctgaaaaatacattagtaagactttaaagatctagtaaattatatgaactatgtttcactcagcatagaaatgcagcacactttttttataatctatagatggtgaaatttaacatgcatgaggctaagaactacttcacatactcttaaaaggaaaaacaagagcagggttaaaggccagaagtgccaagctctaaagattctgtatctaacccaagtaccatcttatcaacaaaaagagaaaaaacaggactgccatttcatgggcaaaaaaaaatgttcagtcatcctgaaggaagtaactagatatatgagagttcacaagaataaaatttatacacacactctctcactctgtctctctctctctgtctctctgtctctgtctctgtctctgtctctgtctctctgtctctctctctctctctcttctctctctctctctgtgtgtgtgtgtgtgtgtgtgtgtgtgtgtgtgtgtgtgtgtgtgtgtgtgtctttctcttctctctagtaaggatgttggtttcttaagccacccaatctatagacatttattaaggcagcttaaagtggctaagatgtgggtgtttaattttttttttcagattcaagaacgagatgccaatttgttcacaaaagaatgttaaaactaatatctgagaatataagaagtttaaaataagttagctatcagaaattctcatatataaatagaaagattataaattgatataagggaagaccaaatgttggcatcaactataacacagtgagcttaccctaagatccagttctattatgacagcaagatgtccatttctgtctcataatatacagaaatttctggtctgtaacaaagatacacaaaaatattaatagcattattaaaaataataaataaaaaatattaatattattaataaaataatttaataataatatttaaaaaatagaattaattagaattaattctaattctctaatagagaattagaataaggttgtgttgatgttgttgttttccagtgcttgggatcaacccaagaccttctgaatgctaggtatttctacaattaaactatacccccagtccttacaatgaacatttttttatgttgagttactctaaaaatagcatgcactcttgatagcctgttaaatatatctattctttttcctcctgtatctaataaaaaataatagtacaacttaaatgtatgagttagctcaagatttgtggggtgatctcttactaacccaaatgatgagtcaatctgatcactatgtttatatctgccaacactgtggtcgactagtccaagtccatgtaatcatcaagttagcaccataaattttgagtcaacaaggaaagataccaggactttaagtcacaaattagtaaatgcaaatgcactaggattgactgcattgtccaagacagcaccagtagatgacacagtcagaatatcaatatgtttctctcaccataaatctatgttcttcttcctacaaaccagtaacaacaaaataaatactttagcaacagcaaaataaacccttagagaaacaacacaagactaaaagtaatgaaatcagaatgaggaatccaccaaaacagctagtgatatgtcctgaatgtatccacataaaacataaatgaagatgtggcttttcttcccaggaaggtggtaatatttatgcaatattaattatttttccaatatgtaattatgttcaaataaccaaaattttaaaggttaaagctaaaagtaattagagtactaaagaaaaccatgtaaccagtgcttcttttgtttatataattctaaatgtaaaataaagtggtgttatttagttgtaaaggtgattgaagaattagaggcttgagttgtaactcaaggttttctcccaagaccaactccaagaatgtaatttcttcctaaagaattagattaggactgctaatttggttcaagacatcatagctggggacactggcattcatagaatgacacataatattgttttattatgattctttgagaaagaccagttggcatttctggaaggttctaaaccatgtggccctcaaaagatgataaaatgcactatgttgacgtgacttcacaacagagaagtgacaagtaggtgaaaatagaaaagttatgaaatattcctggcatctcaaaaccatagccttctctcacctacttctgtggacttggaaaagtttccttgaattcatggagtcatcttttctcatgcatgaaactgtaatggtaaattactgtctcaattaccacagagctttgctagtgaggctgaattacttattgtctaccagtaatttttgcttctcttaaatctttcattggacattgaaaataatatggacagttgttcctccaggacagtgcttagaggcattcaaaatggtccagcatttgacataccaccataggctttcctacaatacagcatctaacaaaaccacactgtctcaaatccctcacaacaggactgttttccttataacaagaaagtcaggaaaacacctaaatgtacatttggtgtgagcccaggcagacagtgtggatcattctgggagagctaaagtccttatgagattgtctaacaaaagaaacatgtcatcagggcctctgtagttccaggtgtgacaagcgtatcttctgtgtgcttccacgtgtgccaagtatatctgtgacaggatcaaggcttccttattgaggagcagaaaactgttgtaaacatgttgaaggcaaatcacacagtcagaaagaggaataaatatggagctttaagtaataaaaatcaaggctttacctataaaatagaaataatatggaagatatactccccaagatccctctcatattttaagtaagtgaacatatgtatatttaaaaatgtatccaatccacaaatactgctgacatactgaacagtatgtcaaatcttatataagacactggcaatatgtaggtcaggaaagcctggtttcttcaagtccagcatgggtgagacacagatcagcagatatatgataagaaccatcagttggatggactgacgactaaaaaagagagtgacagaacagagaaacttcactcaaaaggatgatgactgatttgtaggaagtgttaagcagccagggaaatagaaaagaaaagtagcttcatgaaacaacaagtgagatatggcatcttctaaagaagccctaggaaggttagaatggagggcacgaaggaaataagcaagaacccatgatgcatcattttgtcacaatgcttagcaatggaatgatggactgttacagaataaattataagacctgtgcacaatggagagaagacatacacacaaggagagaacctttggcagctacctcggagagaacatataaaaaattttaaaaattaaataaaaaatcagataatccatattatatgtgaataaacagtttcaataattaaaatgtgtatgacttatagttacataaaaatagattcaatatcattagttatcaggaagaacatcaaaactgtgctgatattccatcttaccccagtcagaatgactattatcaagaaaaaaaaacaataaattttggcaaggatgtgaggaaagaggaaacattatacacttctggtaagaatataaattcagggagtcattatgaaaactagtatagatgttacccaggaagctaaaaatagagccacctcagcacctagctatgccaatcctatgtatattcctgaagtaatcaaagtcagcataccacaacatacttgtcaatctgctaattgcaacagctaatgcatctggtgtgcacatccatggacaactgagtaaggaaaggacctttgtaacaggtatgtgtatatgaaccaaaactatgtgatatatatgtatgaaaatataatgaaccccattgatttgtactaatttaaaaatagtatggccctctccagccatctctacgcagtggacaggttcaacggcacatccaaaaagccagaacatgtgtgacagctttcataaacctactgaggaccagaaccaatgccttagcactgagagtaagcaaaggggtaaggtcacagagaaagtaggaaaaggaatcaatgataataaatgggttgaactaaaagaaattatgggtgacatcaacacaacagaaaagccaatatgaatgattgagtttgagatggtcattgcactattaataatggctgtgattacccacacaagcacaaaacctgtacaagattaagccaggcaaaattctagagtggacaagctggtttttctcctgatctcactcatttttaagaaagcaccaccagcagctgacacctgctaaggatgagataggcattcttcttttgatgatgttcccactggtaggttttgagagcaccagtgagtgcctcacaccagtgcacatataggaaacacatattggatctagtgggttatcaaaaatatgggcaagggagaagaagttgggagggacacattgggagaaatattcaggaatcgaataaagaatgtggtgggtggatatgatcatattttttacttgcatgaaataaaaggaatttgtaatttaaaagtatcatttgtactatattttcttttcattgtcaatacacacattcaaatgaagtttgataatattttctttccatatactcagatttgttctctttggcatacagtacctttggaagggatttccattctctgtagcttggtataggaaatttctacttgaaatttgacctttcagatgtttgccactgcaccaccacatcacacccaaccacaaagttcgtccaaatccttgtcccttacattttaggaacatcaagttatcaatattaataatatcattttctgcattagttcctggaagagaagccttagatagctcatgtagcattttggttaccttttcaaactagtgccaaagcttgacaacatgcctgccatatatcatgataaattcatactgactaattaattcttgaatattggtcaatattgtaaaatagtttgtttattaaatacattgatccttgatgtatgtccagataatgctgcatcaatgcagtttttaaatccgtgacatatttcttgcttacacataatagaaggcaaccctgtcttaggtagtattcacagaatcaagggagggcttggcagagaacacacattctgacgtgagcagaaggatactagcctcatgcctctacttaactccacactgtgcatagctgctcttgccactggtgccaggtacagaactatctcatgctactactcactaactacacccaacttctctcactttgtcttcttgattttcttcactagagttgatggtggagagtataatggaaagttttctgggaaaaagtagaaagggccaagcacacctgatgaatccattacttttctggctctcacgaaaaatctgacaaaagccacttaaggaaggaagggctgattttcacttagtttctgctgatatagtctattattggaggaaggtgtggcatcaggagcaggaggcagttcatcacagtaccctcagtcaggaaacacaaaacagggattgcgtgtgccaaccttgccttctactttttattcagtctggaaccttcccgtggagtagagccatccacataaagggcaggtcttccatccttaatgaatgtagggtacaaagtccctcacaaatacacccagagacatttcaatagtgtctctgaatcctgtcaagttgaaaagacagaccagcttacaagatctgttctcttgggtacaatcatggtagaggtttgggactgggttgtactgaggtgagatggtgcattttgtgtgagccacatagtggagctgtcatcctaaacaaggaagaaaacagtattcggggtgcaatagagagttttagtgttgcagggagccctgtgtaagtacaggtagaattttgagtcattcacaatgtattaacagagttgcaaatcccctacagtgtatggctcttattacactgacataaagacattgcatgtccaactgaagcaacaagcatgttgcagggatcaaatgaaacatccaactttctatatgcctatatcagatgcttttctacttctttgataaaaaatcatgaccagagtgacttacagaaggaagggtttccactgggattagagtccatcataataggatcatcatggcatcaggcggcaggcatagcgtctggaagagcagctgagtcctagctcatgtctcaaaccataaatatcaagcagagacagaaaactccaaatggcacaaatctctaagcactcagtgaaactctctgccagcagggcagtgcctcctacgcctcccaagacaggaccaccaccacaaaacccaccacagcactccatgacaattttcaggcagctgtacttctggcagaaagtcatgtttccacgagaaacagctaaggaccaatggccagtaagatggtgatgggctgtcctaaagctctgttataccttcagtgaaatgtgttaccaaagtaagatccagggggaagccataatgcaaatccaggcacatttcagctttgtgcaaaacagagccatgtgtctcatctctttcattttacagataaagcaaacatatttaaaaattctgtcacctaaaataacatgtccatgttctgttctagctaccctgtcagtagaataatgacctgtgattgatttttttccatctctctgtttggtttgtttggactcatataccaaagatatcttcagacttgctttgtaattgaggatggccttgaactgccaatcctcctccctaaagctgagatgtagtcacacagcaccaagcctggttttcactgcacaccttttcattgctgttgtgcatctgagcagcttgcattcacttcagagccaatgtgtacctgctttctatcctaccagatagaatgatctagccagtgtcagtaatgtatgtcatcttgtcacacatatatgccttcaatattatagtctcctcaagttagttcccaagatcagagaagatacatcaattgtttaatacgtaataacactaataatagttatcaagagaagaagcagtttttcctaaatatgattgtatttatcccatttagatagaagttcatgtatatgatataagatgtccttttgacatttctatttaaatatatttttaaaattctataaaatatcctaatctgaaagggattaagaatattaagcaattattttattttattcatacctaataatctatatctccaattatttttgcctcataaaaaagctcagactcttaatcccagcactctggaggcaaaggcaggtggatctctgtgagctcgaggccagcctggtctccagagcgagtgccaggatagggtccaacgcctaacagagaaaccttgtctcgaaaaaaccaaaataaaaaataaaaaaaataaagctcagactggtcttttccaattgtctttttttagcattgttttttaatagacatgtctttacctctttataaattgtggttttagatttgtagtctgtttgaaaaggagccatcaagtcatatctgaaagctgtaagttcggccaaaaattcaattatgtaaattagcaaacaaatggcagagaaaagaacgctaactgcttctgttctctctaactcaggtaggcagcaaagccagggtgtaaatcaggagagaaaacctgtattctcatgggagcagaggcatttacattcagctttgttctaggtaaaggtcagagtgtaccacattttccatcctacatgaagctggagccattatctgcatccagaccccacgtgtgcactgaactcaggcgtctgtgtgctcaaagggccttattctcctttggcaggtatatatctacactgcagaaccaacagaacaaggcatgaagtgggcagttgatggaccctgaggggaggattacagggagaaaactcaatacagccatagctctgtcacagggttggagggttgctctgaggaagctccttttcattagaaaagattattggaagattggttttggatagaacctgctgtaactatgtttttaatactgctttgatagattctataatatcctataaatatataacaggaggtatgcccagcgatgagaggaaagtacacttggttgagagatacttctcacctcactttaggcagcatagcttttcttaaatctgtgaaatgcatcatttctccttaataaagagatgattcctctaaaactatgatttaaaaaaatcagttttagttcatgcaagtatttcatattagaattgaagaggccagaagtttaagaccaagacaccacacctgacatcagcagagggaaaactatgtctagtacttccctcccaagccacaatgctctccatggtctttcactcagctcacaaagttctaggctttttgtgttttatatccaaagaaaagattcccagcacacaactactagaaagatatttgagcccagttataaatgatttatataaaatagagatgaacataattgatagccatttaattgttagtaactcaccaaaggcagtgatatgcatgaaacctgtctgttaaaataagcaccagtgacaggcaaatttcctgagtggcactgtaatgaaagatggagaaagaatgaaatgtgtagtggggagatgcctcagtggatacaatgcttgctgtacagcattaaaaatagagaatagatcacagaacacacataaaagtaaattaggcaggtggcagagataggacccaatccccagggcaaactgtgtagccaggctacccaggataggtgaagtttggtttgagtaagagatcttgcctcagtaagaaaaaaaaaaaggaaaagtaaagaaaaatatggagagtgatcaaggaagacattcaccaccaattcaccaccaattctgggtctccacaaacacacacacacacacacacacacacacacacacacacactgaatgtgagcatgaatatgtatgtatgcatgtatgtatatatgtatgtgtgtatttgtgcacacatgccctacacacaaagacacatgtcaagaccatgaaatgatttcaaatataacaaagaagcaaaggaaaggcattgcagacaaagtagagagatggcaactacagttaaaaatactcaatacactggtgtatgtaaagatgagaaaataaactgtgctcggtaagtgagaaaaacatagcacatatgaggtactagtgtggaatcttacagaggcaaacaggaaaaatagcaaactctcagaaggcattttgtttcttgtataaaacatgtagtcttcctttcaaagaaaaaaatgtaatcaagtatttttaaaacctgtaatttctttactgtggtcataatgactccaaccatctttcacctttgtgtagtggatattcactgcaagatccagcaagtggtttctttaaacaacttatatgcttctgagcctactaatcatgcaaaaaatgtagtcaatcaggttccattttgtatccaggtttcaggtcacatttgttttatttaaaacagctatgttgaatcagcttcattgcaaactattgactgagaaaggcttaagtgtgtgccaccaaccttgaataaatcactctgcccacaatttctgatataaggctctgaacatccccacaaatctggcctacaaacagctcagcagcgcctttgcaggagagaatggtcatctgtgttataaactagcactgcacttctgtaaaagcaaaagccttaaaaacatgcctaatgctttatcagagatccaccattatttaggtaaatgatgattagcttaaaaaaataggtctgcctaatatatgaagaaaaaataagggaactccatttttatcactataacaataagttgaataaataataatctaaaaataactggggtaataagcataaaagccatgagctacaaaaatattctggcagtttagtatctagcaattgcttaacttattcacatatgcttgtcttgagaccatagtttgaaaatgcaaactattgccataattggatggctaaaaaataacaaaaattttgagatctgcatgaatactttttttgataaaacagttacaattgttgacaatctggtgacacctcaggcttctataggagtaacatggtggtgacactgtcaaaatggaaactctcctgaaatggaggtggacctaaggcagaagactaacaggaaaataatttagatgaagccaagagaaagaatggcatctagggacagtgataaacttgatgtatgtctcaaagacagagaaaagaggagactatgtagtatcacacctctctgttattgatctgcttgctgggctatttaatgtgcctggtaataagaaattatttccccagcttcagacttaaaacgtgatagtaaaaattaatagagtaaaggctattttttgtccttacttcgtgcatttttatgatgctaacatttgtcatgggaatagtaagaagatacacacattgaagagccctcttgttggctctgatgattagtggtttgaacatcagcaaaggtgttcaccctgaaagccaccacgtcactcttgaggattctcagcaccttcagctccccaaatttatgacatgggcaaggtctatggagccagagggaagaccttaggctaattactcaaccttagtaagcttattgtaatatgggaatgacaaggcataactcatagttattgggaggcttataataatgaatgtcccagagaaggtgcatgtctgtcacaaaatagttgtcatcactgtttctcaaacaaacagaatgtaaagaatacatatgtactaattagaattcctaattctggctatatttccatatatatatcacccatggagctatattatagtagagatgctaaactctgtcccccaaaagatatttatttagtaggcacagtagagtcctgtctatgttgcaaagagtctgtgcttgatccttacatccagctagggctataaaagcattttttatcatcaaagaacaaaaaaaaaacttaaaaatgaaaagggctttgaagaatgccaaaaagtctgcctttctaccactgctaccactgccctacaccacacacacacacacacacacacacacacacacacacacacacataaatcaaggacctgtaggtaccttgtaagtagagtgggagcaacacaagctcagggatgtgaattcaattccaagaacccacataaaaagacaggctgggtggtttgtgcttgccattccagcactgaggaggcagagacaacagaatagctggatcttgttggccaggcagcctctcccagtccttgagagaccctgtctcaaaaagtaatgtggagatagactaaagaagataccaaaattgactttggcctctgcttacacaaatacatttgcatatggtcacacacacacacacacacacacacacacacacacacacacacacactgtatctacagagagatgctgactataaatctataattgatatgttgatacagaacttcaggaaacaaaggagacatctttacacggatcatttcagagaagcactagccagctaggcaggttcatctctgtcactcagagctaagcaagctctgtttagactctaatccaaaatgtaaaaccaagggcctgaacttggaccatctggcccatgcttctgccttggattcaagaactgtaaaatctgatgggtgcaaattattcatgtactcccaacatgcactgagtccatcctccagtgtagccctccagttatgttccagaacagcagctggagcctcatcaagctcataaccagcatcctagtaaagagaagtcaaaattgaaagcaaaacaacatgagtgaatatttagctcaacaatcccatgcctctcagagtatacaacagtgaaattgcaaaaaataaataaataaatagagtgatggtgaattgtgcacaaggcatctcagagcaatggagatcaaggccatgattcaaacctgaaaagagagattcaaagaaatccaaaataaagacctgaaaaaaagagaggttagaacagattagggtgacatttctgggtagtatttgtttgttcgattgtttttcctcttattcttctgtgtatttccaagtaaaataaaggaaacaattcaattcattaattattatcctctctggataatgttataagcaatgtttgattaaaccactatcataaacatgtcaaaacaaacctgtcagagactcatgagtgttctccatccagtcattaataataagaaatcaacagccattgactgtataacactgactattgccaaatgcagttctgttaactgtgtattaactcctttaattttaacaattatcatagaaagaaagcaattttgtgctcctgggtaatgtcccacccagtttcctaaaaaaggatggacttattcctacaacactgagagtaatgctaaaatagatcccagtttccacaatgatggatcaggtagtgctgattcaagaggacttgatactcttgaaacaagctgggaaaactgcaagcttatcgacctagtaaccatctccaggtcactccctggagtggtttgaggactcccttctccctctcccttccctcccccagccaactactagcccccccatctcatgcccctctgctccccaggggggtaaggccctccatgagggatccccagagtctgttatatcatcctgggcagggcctaggccctcccccatttgtccaggctgagagaattttaagcaagaaatcaaaactctgagataccatcttacaccagtagaggctaagctaaatgcccttcccctatcatgagactgatgactgccttatatgccatcctcgactcctcatccagtggctgatggaagcagaggcagacatccacagctatatgctgaactgaactctgggacccagttgcagagagggaggagtaaagagcaaagaggttgggaccaggctggtgaaacccacagaaacagctgacctgaacaagggggaacacatggaccccagactgatgtctgggaggccagtataggactgatccagacccctgaacatgaatgtcaattaggaggcctcgggtgctctttggagcccctcgtagtagatcagtatttatccctggagtaagaagggactttgggaacccatcccacattaaaggatgctctctcagcctgaacacatgggggagggcctaggctctgcccaggatgatataacagactctggggatccctcatggagggccttaccctccctggggagcagagggggcatgagatggggggctagtagttggctgggggagggaaaggagagggagaagggattgacatgtgaagcagccttgtttctaatttgaactaataaaaaagaatatcttaggaaaaaaataattttaagcaagttcaaccttcccagtacctactttttctgttacctttctcatcccacgagtgcatcatatggtgtaggaaatatcctacactcttgcctcttggtctgatgttcatgcagtccaatcttgacaggcacagccaagacgctagtcatcttggcagctctcagaattgggtgtcagacactaatacaacaatgacatacaccagtgatgctaggacatataccactcagtagattttgttcctccccatccctaccccagatgagcaagccactgtaagcatgtgctcccatctcctgccacatctgattctgatggactcacatacaagtctcttaagaccagcctggaattaatttgcctgtaaacttgatggatgtagactgttctgatcataaggtgactaaagcaaacctctggatgcatgtgtaggtcacatgaagggtaaagacctgccttgaaatgtgtgctgacaccacctcataggttgttcactctgacaggaaaaggaaaaccaaactccacagagggtctgcattgcttgttctctgctttctgatccacaatgacaagaactgctctacagtgctcagacatactcatcctcaccctgatgggcttagactgaaaaaactacatatcaaaacaacgttccctcccttagactgtgacttcctttgatcacacaagtggaaaacaagtaatagagaaaatctgggtcataggtgcactgaaacctgaccctgtggttcccagaccattagaactgtctggtggtaggaataagatgttggagataaagtctacataatccaaatgatgctttacatgtagtttaatgggtctctgtttgggtcttaaatgatgggaatgaaggctggcaatgtggttttatgggtaaagccaggactgcctacctaagttcagtctcaagaagttccatactatggaaagaaaaaatccattcccaaagttgtcctctggcattcacatgctacacacacacacacacacacacacacacacacacacagagannnnnnnnnnnnnnnnnnnnnnnnnnnnnnnnnnnnnnnnnnnnnnnnnnnnnnnnnaagagagagaggtggtaggaagaaggagaaagatgcaataaaagtaaactacaagaaaacatgcaataaaagtaaactaacaggaaagaaacagagtttctattttaaatgttctatcccaccatattcatttcaggttgaagatatggggattatatccactgaagacattagtgctattaagcagaagtcaaaaactttgcactggaatggtagctagatccaacctactgcaggttctaagatctaaaatcaaactcatttgaaagactgtttcttagtaaatgagcactgctaagttgccttgcgtacacaatggcacgtaagaaagtgggttctaggatttagctgcccagctcatggaggatgctgcagccatgatgcatggacactttgctactgtttcagcttataataaattttataaaccttatcctgctgcttttgcatgattgcagaatgggacaattgctgggacgtgtgggcttccagctagagtttaaggatgacctgagaggccaggcaatgtgggacagggttgcactcccagtaaagattcccagaaatagaaatggaatgtagactccagaattgtggagatgctaggaatacagaatgcctgccatagacaagagaagtcttctgagtaaagaggtcatgagggcttcaaatagaaagccataggaagagctgtgaagccctcagcactcatatcatgacaaaaacattctggacacataattctcaaaagatgtctgctttttctttatgttcacttaaaaacatgtgtgtgtgtgtgtgtgtgtgtgtgtacgcgcgcacacaaatatatacagtttaaatgtagttatgccacttggggtgacaatgcttccctatgagcggtagattatttaacagtgaaaccccaatgccaagcatgggaaacctgcctttgaaattggcaagaaggggagtgtataagagacccccaaacaatgcagactactgctgttgcccttagtttcctcccagaactcaaaggttaaagcctgtttctggttacaactgactggaagccttctccctgaggactagagttccaagagaaaaaagcaatccacagtcctacccatctgccaagcctctgaaccacaaaaatgactatcatgacacaatatcccaaaggggacaaaaatagcaattacacgttggaataaacaaagctacctcattggatgtaaggcccacacaaaagaagggaaattatgcctggtcctgtaaacttagccaattacccttagggtccaaggtcatagaccctagggagagtctgccacttcctcttaccaaaaccagtatgatttctaagttcattctaaatatttacctctgtacccacagatacctgtaccagtcacctctcacaaaagaagattcgttttgcagatgatgaagaccaatacagaaagccataactggtcaaaatgtacagaacaactgtggggtgcctatctccaaagcacttagatcacaattcctgcacctaagactcaggaaacattgcggaagaggccacagaaagattataaaagccaaggatcaggatgggatgtctgctgtgagatagtgtcttcagggaagctacattcatgagtagtaggctttcttggactgccagacttcaaatcatgacacagagacatcttaattatttttgcttggccttcacttaggcttgatttctagttaggtttgtttttaattaaattaacctgtttctattaatctatgttctacctcaaggcttgtttacatcatatacatactatctatcctgatttcctacttcctccatgtctgggtggctgttcacttgctggctggccctagccaactgtcccctggctggctcttcttatctctctgctgccagccctgcctatcccttatctacctaaatgttggcatttcagcatttaattagaccaatcaggtaccttaggcagacaaggtgaaacagcaacacatctttaaacagttaaacaaatattctattccttggcacccatgaagttccagcaatttgactccctaaacaagatcatcacaatgatgacgcggttgacatgccaaactggatgaggaaatctcataagttcccacccctgaatgaggaagtataggcaattagtggacacttagagagggagaattggtcttctccagaaacaaggccctgatatgctacacataccaaagaccatccttaaacacatgaacacacaggcaacactaaaaggattcattatgttgtatttatatgtctgtatgtgtatacacaagtgtgtgcacatatgtgagtgtgtgtgtgaataatgactaaagaggaggtcaaggcaggctatggcggcagaagcctttaaccccatcactcaggaagcagaggcagacagatctctgagtttgaggccatcttgctctacagagcaagttccagagcagccagggcaaaaggtcatgaatttgaggagtggaagagacaaacataggaggaattggaggcagaacactataaatacaatccacataactgaacttctgaaaagaattaataaagatgtcagtaaagtcaccttcactgattttgctacaatgtttaaaagttgaaatgtttagttgttattttaactgtgtaaagtcttcatgtcaaggtttcaagttccccctgttgttgcttcaattttgcctccctgctttgctttgggatttgttgacttcattctttatctggagtctctaactgttagtgacatgttctccttcccttaagtgataaaggatgctggaatttaactgtgataaattccctttccctgaacagtgggcctttgtcagagagaaggcgctgggtgtctttcataaaccttattatttccttctgaaactcacaagctttttctgtcgtcaaccttgaatcttgtatggctccatagagacataaagctctttccagcaaggtgttatttgttataaataaggacaattaatttaaaatttaaaaattgctaaaagaacagtaagcttccaatcaaagatcaaatttacatttcaggtgttagatagatacttgtctaaagagaatcatgacctggaggtggcagagtcagagaaaattttaaaataaattagaatggcaaggtgttctaacactttagtgttctatgcatatcactttgaagctcaaaacaataaatattaagaaaataacacagttaaaatgggatgatgaatttaaagaatttctcaaaaatacatagttaataaacatataaaactgtttaacatcctttattataagagaaattcagattaagcttcttttggatttcagctcacccaagtcagattggctatcatcaagaatgcaaatgtaggactggaaagacatctcagcatgtgagaaatcttgtgctgttccaaaagactaaagttccttttccagtgcctatattgggtggctcacattggcctgtgatactatttctattatcctccttgggcacctgcacttacttgtatataccctcacacagatacatatatgtaaacataaataattcttgtagcttttggacacagcaaggcagctgtacatatgaactcacagcagttgtgacactgtacacaagatctgtgcaagctgaacacagaagatcccatgccagagaaaggaggcaaacacaaagcctcacccctagccattggcaatccttaggtactgggaaagggaaagtcagttttacttaacagtgtttcttctggtaacagtgtatccacagtgctccaatggaaggtcacacatctgtgtggaaagcacaagttggacttgatgattaaaaaggggtggggggcacagatacatggtagggaaaatggttgtagtgctatgaattagaatggccctcacaggcttgtgtatttgaatgcttggtcaacagaactttttggaaagggttaggagatgtggccttgttgaaagagggggccttttggggtctaataagcccttgcactcccagttagctctcactgcttcctgtttgtgggttagatgtaagctctccagcaccgctccagtactgtgcccacctgcctgtgacgatgttcccagtcctgataatcatgaactctaacctcctggaaccatgagtcccccatagtaaatgttttcttttataagtttttgtctttgtaatggtattttgccatggcaatagaaaaggaactaagacaggggtacatatttgggaaaattggggaagagatggatacaataaaaattcattgtacaaaattctcaaagaagtaatcatttcttttaatcttattttaaaatagagttaaaatgaaaacagcatgcatataggagtgtggatcagtgaagccactaggaagcagtgatggagcaggaactctactatatgacagagctgcaatgctcatgagcatgttcccagagctacaacgctcctaagcatgttttcaaagctacgaacgaaactcctgaacatgtgcccagggctacattcctgagcatgagcccataactataactccctgagcatgctcccagaggactttatttcttactacaaagatgcctcacagccatgctttgacacttcattcacaatagcttgggaatggaatcagcctcagtgttcagccactgatgaactgataattaaaaggtggtacttatacaaaatcagaatttatttggccataaagaaaaatgaaattatgagatgtatgggtaaatggaaggaagtgggggcaattctattgaataacgttcactggaagtgcattagggagggggaataacagaacatagattaaaatgaaagtagaggaagataatgctgtgggtgagattaagtaaggagaagagtccagagatggccaagaggaggggttgggagaaggttaacctaaagaaaatgtgtgtggataagctatatggaaactattatcatgtaacacagttaaaacataattttcttcaaagggggttagagggaagctgttctctttgactgcaccatgctgctcctaaaagctgtgcattattgaaaaaaacaaatctcagtgccatatgttaaacaccttcacatcagttgttggccataaaagtcacagggacctccagaataagcaggctttttgcagtaggagactgcattactaaagaaatcaagctagaactgtgctggaagcctcctccctgctttccagctttcatggggctggaaagtactatgtatgcccctgggtagaaaaagacatcagcagtcttagccagctgtgaaccccatgcatttttgccagccagggtgctcccatttgtccaacagtggcatgactgttaaggggacaactcctgttctctggctggttttgagtggaccatacaagagaggaatgatgtctggaactgtaagactgaccaaaaacacgtggctggggaattaatgagccctaggtagaacactgctgttactcagttgaattaacacaacaccaaactgcattctaaatatacattatccacattggcaaatgcaactctaagcattaaccaaatatgcctgttcattaacagtgaacagctacaaaagctcaagtgctgacggacaataactaatggttgaatgctcaaaccagaagtgatcgtggtggtttgaatatgatgacccctgtagtctccagcaaccagttggtggcactatttgggcagttcaaaaggagtggccatgctggagaaattgtgtcactagatcaagcattggaagttcaaagatgagccattcccagttttcatttggcttcctgattttggtttaagatgtgagctcatgtctgctgccccaccatgcttccctgccatgacggtggactctaatctctctggaacagtaagcgaattaagttcttttctgtgaattgtcttggtcatgatattttataacagcaacagaaaactagccgatagagaacacatgatggaaggaggatcataaagaatataagcacagaaggataaagaggagagacacaaaatcaccatctctgtgcacttcacagcccttgcaaacatgaacttaaggctgctgctgttattcacacagggccttcacaagactggtctcttcaataaacaagtacaggaaccctcccccactgaaccatgaatactgatagattcttggaaatggggaatcattgtctttggatgtttactcactgatgagcccaccaagctataagtggactgttccaaacccatagtcacacagatggttctggttaaattcattgagtcaaaaataatacaaaaaaagcatgattatgggacaggtatttacaaagagaattcaaattgaaaaaggaaaaatgaagatcagaaagtttgggagtgagaataattataacctattatatacatgaattagtttttgaaagaacaaatttagttaagataaaataaatttaaaagtacagtgaaaagggagataaatattaagtagcaacctaaggtatatgcaattatgcatcactgctattctatcagtttatacttattatttaatataagcagggccgatataatataaaataatcaatttccaatctttttaatccttagggatcacatcttatttataataaaatatcaccatctagtggcattaatttcaaactgcaggcaaaagatactataggattttatgtttaacaaaagtgtcacatattcaaacacaaaacctattttaaaataaaccaactacttcagtaagaatgaattataatgttagaaggccaataaataagaatctatttcagataacgatattcaaaaagctagttcatgagtgaggcctatgtgctgtttgtgaatccttgtgctaaataaataaataaagcttaacagacagcacatgctctgaagtgtatggtgtgtaatgaagtttctgaacattgtgatataagagcctctttttcttgtgggccttgttggtctatagaaggtttaatactttgagaaatactgctttagggtgtacctgccatagggcaattaacaggtatcttagactatattcatcacaaagtgaagggaaacgatttattctgcataatttcatgctactctgctgatacagcaatggatagatgctctcaatcacacatcctcacataattcacagatgggttaaatgggggatataaaacaaatcagcaaaaacaaatgagagacagcaaaggtgttgagcatgagaaagcagaaaatctgaaccatctgagatgtcttaaagaaaattatgatttaagtttgggtcatattcaatgtgaacaagtggacaattagacacatgattctaaaatttggggacaaggtctaagagaagtatacacctaggtacaccgacactaattaacagtatttaatgttttaacactgaggttaataagtaaataaacttttatacaccagagaaaggatataaagatgggatctcaagacacatggcaattcacaattctagaattgtgatagaaaaaaaaatgctatcggactgagtctaacttgtagcctgcttttgtgtataatggtttttaaagacacgtttatttgtatttcatgtgtatcagtaccgtggtgtgtgtgtgtgtgtgtgtgtgtgtgtgtgtgtgtgtgtgtgtgcgcgtgcgcgcgccgtatcaggtttatagagatcaaagaacaacttacagaagtgggttcttttcttctgccctgtggcttctgggaactgaactcaggcttagtaggcttagcagcaagcatctgctaaactactgagccacctcccttgtaacacctggtgtcttcacaggctaaaagaaagcatggaatcatctggaactaaagttacagattgttgtcagctgtcatgtgctgggaactgaaccaagatcatctgttgagtatccctgaaggcttgatgtttttaaacaaatctaagtgctgaatgaagcacagtagtgaccagaggtggggatgttgacccataagctactttgttatatggccattttatagaaagcattgttgaccggttgtctagatgatagacgtgacccatgaacaccacatctcaagatcaagtgaggccaggtctcataagggagggaaaactgtcaaactctgggcatgaggatagatgaaaaaaggtgtataattggagtttaccataggcttagcaagataaaggacatcacaatcttgggagtcatgatcagtaagttattgaatcaaatttattgaaccaaagtttttgaaagtttgactgggatatgaggaggtagaagcaataataggtaggactttttcagagtttttccattttggtgatgaatagttgagatgcagcttcatttgggtgtgtgaaaatggggtatagcgatgagtatgtgccttgaatgagatcagggtggtcctccacaaaaactcaaagatagagactctggggaaagatgccactgggaggcagcatgctgtgtcaggagacagaacattttatgttctgaaggcatccatgttctcagcaagtaagagggtcaacagataagaaagtggatgtgagaatacatggtggaaattttaagatagcgtatacagaaatatttgttccttacagtggaaaagagaaggatttaaaaatacagcatttttgccctccatccataagggttaatttaacataatttgagagaaactgcaagtaaaacatagctcatcaaacatatggaaaaactgggtgggtgtaatgataagtctttctgacagccacccgcttccgccgcaacattaggacaccctgccacaaaataagacacaaagacttatattaggtacaatgctgctggccaatgactaggatttcttatcatctacctcagtcttaattatcaaccataattattaatctatgtatttataaagacttatcaaggacgccagcagtatgcaccctctcttgccagtgatcacatggcaactgtatctttactacatttcccagaatcctcctcaactcctagccccatctatctttctttcctatttgccaacagtgctttatttatcaaccaataggacaaacctatacacagaaggacttctcccatcagctgggcacatatggtgacatatttttatgatctaataaagccactgaagatcagagtgcaaagttagccacagccatagaagctgagcagtaaagtgatggcacacacctttaattccaggactcaggagacagaggaaggtggatctctgtgagttcaaagccatcaagggctacatgggagtgaatcagtctataggaactcacacttttaatcccagcactagagaggtaagataggagtggggtgttcagtagtaagtcttaggcattcaatctcagtcattcagtttccaaccacactgagaattcatggagccacagtagtcccagcctaggtagaggtaagagctagtgactggctgctttgcttctcttcagcttgaacccgaatatctgtctctgggtttttaattatttgtgctacaaattggtgcccaacatgactcacaaacccatgaccctgagattaagagtcttaggctctcccagctgatataaggagggatatagcagcaaggagaatagagaatgtatttttaaagcataagactggaaggtgcatcacagagagaaatttaagagggaatatctctgttctttactggaattgcctgtgtggtttatgcagtaaatgcattcatattacagctcacatcaatgcctctgaattagtggaatggaaagaaatgtttttcttcttctgttttcacagtaagagcattaggaatcataattaaaaatagtagttgtgagaaaggtaagtttcaccaccaacacattatttaggttaagcacctggtggcaaagttcgagtgtacaaattcaagagaataaatggtcctatgaatataaggtgaaaggggccacagatatacagtagatgagaattaagtcttatatctcataaaagatgtcattacactaggcatcaatctatgaattcccacgccaaaaccaaagtcaatcagctattttgttgagtgctctctaggggtgactccctgaaggaaaaagagacagagagatgagtcatgtattctctcacacaatgcatagacacaatgcattgaggacacaggctttcaactggtaccacactacatgcagcaggaactctgagctcttaaagttggctaagtagagtaagagtcataaggaaaagctaatggtgctcatttctttcttttaagatattaaaaactagtcactgaatattattttaagcaagggagaatagtctgagtatctttgtctgcttgctctttgaaagaacaagggaagaaatgaatttgaacttcagtgtgcacagtgtcatacagtgaaagaaagccagagcagaggagtactgttgggaccagagcttcctctctgctttctctctacttcagcttgtaacaggctcccccatgattggcgatggaaatttctgagagggacttatgtgtcaccagcaagacagaaagcagttcctatcatagccaagttcactgactgtctgtgaagcagtggcagcagctgccacccatcgggagctttgttgtgcccaactgcatctccctccctgctaggcagtggcgagcttctcttgccagcaaacctcctccccacagtcggttcccagccacaggcaccgttatattgctttactctctgtttccacatgaatttggaactttccagcttcctgtttcctgtgtcatgctgggtcctcacacatactcttagatacaaaaaacactctagaagatcgtgacggaacaaactgtgaagggaagcgctttagtacagcccttgctgtgtgtaaaattctttcctgcctcagagatgtgagacatgctttcacattttaaacctttcctatgattaatgaaatcaacttttgaaaaagagtcagaaatttttcttggaatagagggaaactttgatacaaattttatgaagtcaaagatgtttcctagactctcattagtttgaagttagtgaaattatatttaacaactaactatgcactttcattctctcccttttttggattattttgaaaggaaaaaaggatgagcaaattcttcatctaagatttacatctctctacttgtgacagacacaaagtgggaagctgtggaacataatgaggtcttcatatattgacttcattgccaaaggttgaaggaaatgccaaagcaacagctcatattaaatctaacaaccagataattctaggaaggaatatttacctgttataacacccaaataatccctgggctttcacctccctctattcttgcagttatgcttcctaatcccccttgtcctttcataggaaatacattcagattgagcatgcaaaattattgaatccatgttattgtttgtctaactccatcctatcgctttcctgtgtgtcgactggctttaatcttaaaataactatttaataaagaactgcatgccctaagaaccatattattatttaaacaaaaaaagccatcagaaacattgagtaatgctgctgtgaacatcgttgaagatgtccttgttgtatgaatgtacttcttttgggtagatgcctaagagtggaattgctggatcttgtggtaaactgattcccatttttttttttgaggagtcgccatactgatatccaaagaggctatacaagttggcactcccactagtggtggagaagtattcccctttctccacatcctctccaacatgaactgtcatagtagtttttttgattttggtcattctgacaggggtaagatggtatctcggagttgttttgatttgcatttccctgatggctaaggatgttgaacaatttctcatgtgtctttcagcagctgttttagattcctctattgagaattgtctatttagttctgtaccacactttttaattgaattgtttggtgttttgaagaccagcttcttgagttctttgtatattttggagatcagacctctgtctgatgtcgggttggtgaatatctttacccatctgtcagctgtcgttttgtcttgctgactgtctcctttgccttacagaagcttctcagtttcaggaggtcccatttatcaattgttgacctcagtgtctgtgctactggtgcaatgttcagtactggtggtctcctgtactaattaattcaaggttattcccactttgtcttctaataggttcactgtagctggatttatgttgagatctttgatccattttgacttaagttttgtgcaaggagataggcttgggtctaactgcagtcttctacatgtctgcaaccagttatgccagcaccatttgttgaagatgttctctttgttccatcatataaatttggattgtttatcaaaaatcaggtcatcataggtgtgtgggttaatatgagggttttaaacactataccattggtctacctgtctatttttgtgctgataccaagctgttttcaggactatagctctgtcaaacaagagctaacaccagtactcctcaaagagtttggcacaatagaagctgaagggacattgccaaactctttttaaaatgctaaaatcactttgatacccaggccacacaaagatacaactaaaaagaactacaggccaatatcaggtctgtgaagaattgtgttgggattttaatggggattacattgaatctttagattgcttttggcaagattgccatttttactatgttgaacttacctgtccaagagcatggaagatctttccattttctcatatcgtcttgaatttctttctttagagactcaaaattcttatggtacaggtccatgcccctcaaccgaagaatggatagagaaaatgtgnnnnnnnnnnnnnnnnnnnnnnnnnnnnnnnnnnnnnnnnnnnnnnnnnnnnnnnnnnnnnnnnnnnnnnnnnnnnnnnnnnnnnnnnnnnnnnnnnnnnnnnnnnnnnnnnnnnnnnnnnnnnnnnnnnnnnnnnnnnnnnnnnnnnnnnnnnnnnnnnnnnnnnnnnnnnnnnnnnnnnnnnnnnnnnnnnnnnnnnnnnnnnnnnnnnnnnnnnnnnnnnnnnnnnnnnnnnnnnnnnnnnnnnnnnnnnnnnnnnnnnnnnnnnnnngaaggggagagggtcaagatctgctgagcaaattgggagcatgggaagaagggagagctaggagaatgataagaggagaagaagagggatgaagaggacatgagggagcagaaagtctgagtcaggggaagaatagatgataacaagaatggagatataatagagggagacattttaggtttacagagaaatcaggcactagggaaatgtctggagatctacaaaggtgacaccagctaacaatctaagcaacacaggagaggctaccttaaatgccctcccctgattatgaggttgatgactggcttatatgccatcctatagccttcatccagcagctggtggaagtagaagcagacacccacaagtaatcaccgaactgaactggaagatgcagagaaggaccagtgaagagcacaggggtccagaccaggctggtgaaacccacagaaacagctgacctgaacatcagggaactcttgctccccagactgatagctggaataccagcatgggactgatccacatcccaggaacatgggtttctgtggggaaacatcagaaatgtatgggacctcctgtagaatttcagtacttatccctagcatagttgtggactttgggagcccattccatatagagtaatactctctcagccaagacacacggctgtgagcctaggccatatcccaaaggatacaatagacactgatgacgccctatggaaagccttaccatccaggaggagcagaaaggatatgtgatagatagggttttagttggggtggcagtaggggaggacaggtgggagtagggaactgggattgtcatgtaaaacaatcctgtttttaattcaaatgaaaatattcaaaagctatgcatacattatccctgagacattatattattaatattctttttatttttatagaaaacttgctttttcatctatgtgttatagttaaggttctattgtcttatcaaaattcttttgatccaagggccattatttattcttttcccaaagtcataaattattaaaagtctttgggtctaagaaaaatattttgaccctctggttagagattgtttagtaaaaatcagaaaagattttattttttattattctcatggcctgtatagcattggatataccctatgaatcttgttagcctcagaatttccttaaatcttttaaatttcactaacttcctgaattttatgagactttctctttcctctgggagagaaggtttcagtccctcatatgaaatccctgaacacagctacaaagacaaaattttataaagccattaaaggatctagaagcatgggactttgtgcagaatctgggtagagcaagctaatctctcctccttaacacagtaaagccaagtgagcacaatattctgcaagaggaaagcagttttaccagggagattaaaaattagaacccagttgacccagagaatattgcacacttctattaaaagtttaaggacatctgatcccctataccatttttcaatgtgaagggatagttttaaggtcaaatgtttcatataattattgaataagtcgctgtgtatatacaaaaatcaactaatttaaaaggatcaaattaatacagagactcctcttcaatgaagaatggatcctgtatcttgactgctacaatggcatgtgaaaacccctttccatagcaataaacagcaagctttgactattacaaagcccttgtttttcactgttttctgtaaatattttaaatgtaggcaaaattacaaaccatatctagatccattttttctgtgttagcataagactgaatacaaaatatgagttctgaacctcacctccatccctaaaatagactaacttctagagtctgccttccatttccactccctggggaatccacagaccttggcaggtcttagccttcttcactcaccatacctttgtatcaactgtgaatatacagaggtactctcttcatagaaacccacagttcatgctggcctgggaattggggaaatgatnnnnnnnnnnnnnnnnnnnnnnnnnnnttcctgaccacaattgcaaatagcctggtctcagtaccgaaacaggggaaggacccagaaacatagaaggaaaatttcctaacttaagtaaggtggtacccatagaggtacaagaagcacacagaacaccagatagagcaaaccaaaaaataaagttcccttagcacataataatcgaaaacactaaacataaataacaaagaaataacattaaaatttgcaaaggaaaatgaacaaataatataaaaacagacccttagaataacacttgacttctcaatggagactctaaaagcctgaaggtttagatgaatattctgccaactctaaaagaccacagatgccagcttagtctactatattcaacaaaacatttaatcacatctgatatatagagaaaaacattccacaataaaacaaaatttaagcagcatctagttaacaatctctacagagtcactagaaggaaaacttcaacctaaagcggttaaagtttagtcacacccaagaaaatataagaaataaataattccagacaagaaaatcaaaagaggggctaaaaaggaacaaaaataacaacataataacataatcaacaaataatgcttattgacaactctcaacatcaatggtgtcatttcacccataaaagatagaaactaacagattgaattataaaacaggacccatccttcttcagcatccaagaaacacttcttagcatcaaggatagacatcacctcagaggagaaaaaatggaaaaagatattccaagcaaatgaacctaagaagcaagctggtgtaacaaatttaatatctgacagaatagtcttcaaaccaaaactaatctgaagagatagggaaggacattgcattctcatcaaaggaaacctcaaccaagaagacattgacttttttttcttctgaggaagcgagtgaaacagggtttctctgtgtagctttggatcctgtcctggaactcactctgtagaccaggttggcctggaactcatagagatctgcctgcctttgcctcctgagtgctggaattaaagactaaaggagtgcaccagcaatgcccagtgacattgtaattcttaacatctattctccaaccacaagagcatccatatttgtaaaagaaactttacaacttaaatcatatattgaccaccacacactaatagtgggatcttctataccacatgcttactaataggttatccagacaaaaactaaatgaagtcatgaataaaacagacctagcagatatttaaagaatatttcacctaaacacaaaagaatatacatttttctcagtacttcatgtaatatacgtggaactctctccaaaatttattatatacttggacaaaaagtaagcctcaacagatacaagaaaattgaaatagctccctgcatcctatctgatcaccatggattaaaactggatagaaacagcagaaagtttataaacccatataaattgaaaaactcactaatgaatgaaaaatggataaagacaaaaatcaagaaagaaaataaaatcatttataattaaatgaaaatgaaagcaaaacatactcaaacctctgggccacactgaaggaagttctaagagttaagttcatgacacaaatcaccaactcttagaaagagaaagcaagaaagcaagcaagcaagcaagcaagaaagaaagaaagaaagaaagaaagaaagaaagaaagaaagaaagaaagaaagaaagannnnnnnnnnnnnnnnnnnnnnnnnnnnnnnnnnnnnnnnnnnnnnnnnnnnnnnnnnnnnnnnnnnnnnnnnnnnnnnnnnnnnnnnnnnnnnnnnnnnnnnnnnnnnnnnnnnnnnnnnnnnnnnnnnnnnnnnnnnnnnnnnnnnnnnnnnnnnnnnnnnnnnnnnnnnnnnnnnnnnnnnnnnnnnnnnnnnnnnnnnnnnnnnnnnnnnnnnnnnnnnnnnnnnnnnnnnnnnnnnnnnnnnnnnnnnnnnnnnnnnnnnnnnnnnnnnnnnnnnnnnnnnnnnnnnnnnnnnnnnnnnnnnnnnnnnnnnnnnnnnnnnnnnnnnnnnnnnnnnnnnnnnnnnnnnnnnnnnnnnnnnnnnnnnnnnnnnnnnnnnnnnnnnnnnnnnnnnnnnnnnnnnnnnnnnnnnnnnnnnnnnnnnnnnnnnnnnnnnnnnnnnnnnnnnnnnnnnnnnnnnnnnnnnnnnnnnnnnnnnnnnnnnnnnnnnnnnnnnnnnnnnnnnnnnnnnnnnnnnnnnnnnnnnnnnnnnnnnnnnnnnnnnnnnnnnnnnnnnnnnnnnnnnnnnnnnnnnnnnnnnnnnnnnnnnnnnnnnnnnnnnnnnnnnnnnnnnnnnnnnnnnnnnnnnnnnnnnnnnnnnnnnnnnnnnnnnnnnnnnnnnnnnnnnnnnnnnnnnnnnnnnnnnnnnnnnnnnnnnnnnnnnnnnnnnnnnnnnnnnnnnnnnnnnnnnnnnnnnnnnnnnnnnnnnnnnnnnnnnnnnnnnnnnnnnnnnnnnnnnnnnnnnnnnnnnnnnnnnnnnnnnnnnnnnnnnnnnnnnnnnnnnnnnnnnnnnnnnnnnnnnnnnnnnnnnnnnnnnnnnnnnnnnnnnnnnnnnnnnnnnnnnnnnnnnnnnnnnnnnnnnnnnnnnnnnnnnnnnnnnnnnnnnnnnnnnnnnnnnnnnnnnnnnnnnnnnnnnnnnnnnnnnnnnnnnnnnnnnnnnnnnnnnnnnnnnnnnnnnnnnnnnnnnnnnnnnnnnnnnnnnnnnnnnnnnnnnnnnnnnnnnnnnnnnnnnnnnnnnnnnnnnnnnnnnnnnnnnnnnnnnnnnnnnnnnnnnnnnnnnnnnnnnnnnnnnnnnnnnnnnnnnnnnnnnnnnnnnnnnnnnnnnnnnnnnnnnnnnnnnnnnnnnnnnnnnnnnnnnnnnnnnnnnnnnnnnnnnnnnnnnnnnnnnnnnnnnnnnnnnnnnnnnnnnnnnnnnnnnnnnnnnnnnnnnnnnnnnnnnnnnnnnnnnnnnnnnnnnnnnnnnnnnnnnnnnnnnnnnnnnnnnnnnnnnnnnnnnnnnnnnnnnnnnnnnnnnnnnnnnnnnnnnnnnnnnnnnnnnnnnnnnnnnnnnnnnnnnnnnnnnnnnnnnnnnnnnnnnnnnnnnnnnnnnnnnnnnnnnnnnnnnnnnnnnnnnnnnnnnnnnnnnnnnnnnnnnnnnnnnnnnnnnnnnnnnnnnnnnnnnnnnnnnnnnnnnnnnnnnnnnnnnnnnnnnnnnnnnnnnnnnnnnnnnnnnnnnnnnnnnnnnnnnnnnnnnnnnnnnnnnnnnnnnnnnnnnnnnnnnnnnnnnnnnnnnnnnnnnnnnnnnnnnnnnnnnnnnnnnnnnnnnnnnnnnnnnnnnnnnnnnnnnnnnnnnnnnnnnnnnnnnnnnnnnnnnnnnnnnnnnnnnnnnnnnnnnnnnnnnnnnnnnnnnnnnnnnnnnnnnnnnnnnnnnnnnnnnnnnnnnnnnnnnnnnnnnnnnnnnnnnnnnnnnnnnnnnnnnnnnnnnnnnnnnnnnnnnnnnnnnnnnnnnnnnnnnnnnnnnnnnnnnnnnnnnnnnnnnnnnnnnnnnnnnnnnnnnnnnnnnnnnnnnnnnnnnnnnnnnnnnnnnnnnnnnnnnnnnnnnnnnnnnnnnnnnnnnnnnnnnnnnnnnnnnnnnnnnnnnnnnnnnnnnnnnnnnnnnnnnnnnnnnnnnnnnnnnnnnnnnnnnnnnnnnnnnnnnnnnnnnnnnnnnnnnnnnnnnnnnnnnnnnnnnnnnnnnnnnnnnnnnnnnnnnnnnnnnnnnnnnnnnnnnnnnnnnnnnnnnnnnnnnnnnnnnnnnnnnnnnnnnnnnnnnnnnnnnnnnnnnnnnnnnnnnnnnnnnnnnnnnnnnnnnnnnnnnnnnnnnnnnnnnnnnnnnnnnnnnnnnnnnnnnnnnnnnnnnnnnnnnnnnnnnnnnnnnnnnnnnnnnnnnnnnnnnnnnnnnnnnnnnnnnnnnnnnnnnnnnnnnnnnnnnnnnnnnnnnnnnnnnnnnnnnnnnnnnnnnnnnnnnnnnnnnnnnnnnnnnnnnnnnnnnnnnnnnnnnnnnnnnnnnnnnnnnnnnnnnnnnnnnnnnnnnnnnnnnnnnnnnnnnnnnnnnnnnnnnnnnnnnnnnnnnnnnnnnnnnnnnnnnnnnnnnnnnnnnnnnnnnnnnnnnnnnnnnnnnnnnnnnnnnnnnnnnnnnnnnnnnnnnnnnnnnnnnnnnnnnnnnnnnnnnnnnnnnnnnnnnnnnnnnnnnnnnnnnnnnnnnnnnnnnnnnnnnnnnnnnnnnnnnnnnnnnnnnnnnnnnnnnnnnnnnnnnnnnnnnnnnnnnnnnnnnnnnnnnnnnnnnnnnnnnnnnnnnnnnnnnnnnnnnnnnnnnnnnnnnnnnnnnnnnnnnnnnnnnnnnnnnnnnnnnnnnnnnnnnnnnnnnnnnnnnnnnnnnnnnnnnnnnnnnnnnnnnnnnnnnnnnnnnnnnnnnnnnnnnnnnnnnnnnnnnnnnnnnnnnnnnnnnnnnnnnnnnnnnnnnnnnnnnnnnnnnnnnnnnnnnnnnnnnnnnnnnnnnnnnnnnnnnnnnnnnnnnnnnnnnnnnnnnnnnnnnnnnnnnnnnnnnnnnnnnnnnnnnnnnnnnnnnnnnnnnnnnnnnnnnnnnnnnnnnnnnnnnnnnnnnnnnnnnnnnnnnnnnnnnnnnnnnnnnnnnnnnnnnnnnnnnnnnnnnnnnnnnnnnnnnnnnnnnnnnnnnnnnnnnnnnnnnnnnnnnnnnnnnnnnnnnnnnnnnnnnnnnnnnnnnnnnnnnnnnnnnnnnnnnnnnnnnnnnnnnnnnnnnnnnnnnnnnnnnnnnnnnnnnnnnnnnnnnnnnnnnnnnnnnnnnnnnnnnnnnnnnnnnnnnnnnnnnnnnnnnnnnnnnnnnnnnnnnnnnnnnnnnnnnnnnnnnnnnnnnnnnnnnnnnnnnnnnnnnnnnnnnnnnnnnnnnnnnnnnnnnnnnnnnnnnnnnnnnnnnnnnnnnnnnnnnnnnnnnnnnnnnnnnnnnnnnnnnnnnnnnnnnnnnnnnnnnnnnnnnnnnnnnnnnnnnnnnnnnnnnnnnnnnnnnnnnnnnnnnnnnnnnnnnnnnnnnnnnnnnnnnnnnnnnnnnnnnnnnnnnnnnnnnnnnnnnnnnnnnnnnnnnnnnnnnnnnnnnnnnnnnnnnnnnnnnnnnnnnnnnnnnnnnnnnnnnnnnnnnnnnnnnnnnnnnnnnnnnnnnnnnnnnnnnnnnnnnnnnnnnnnnnnnnnnnnnnnnnnnnnnnnnnnnnnnnnnnnnnnnnnnnnnnnnnnnnnnnnnnnnnnnnnnnnnnnnnnnnnnnnnnnnnnnnnnnnnnnnnnnnnnnnnnnnnnnnnnnnnnnnnnnnnnnnnnnnnnnnnnnnnnnnnnnnnnnnnnnnnnnnnnnnnnnnnnnnnnnnnnnnnnnnnnnnnnnnnnnnnnnnnnnnnnnnnnnnnnnnnnnnnnnnnnnnnnnnnnnnnnnnnnnnnnnnnnnnnnnnnnnnnnnnnnnnnnnnnnnnnnnnnnnnnnnnnnnnnnnnnnnnnnnnnnnnnnnnnnnnnnnnnnnnnnnnnnnnnnnnnnnnnnnnnnnnnnnnnnnnnnnnnnnnnnnnnnnnnnnnnnnnnnnnnnnnnnnnnnnnnnnnnnnnnnnnnnnnnnnnnnnnnnnnnnnnnnnnnnnnnnnnnnnnnnnnnnnnnnnnnnnnnnnnnnnnnnnnnnnnnnnnnnnnnnnnnnnnnnnnnnnnnnnnnnnnnnnnnnnnnnnnnnnnnnnnnnnnnnnnnnnnnnnnnnnnnnnnnnnnnnnnnnnnnnnnnnnnnnnaggaaagaaggaaagaaggaaagaaggaaggaaggagactacatagtaaaacttgatggtacacctgaaagttccagaacaaaataaagaaaacataaccaaaaagagtagatggcaagaaataatcaaacacaaagctgaaatcaataaaagtgaaactaaaaacaacaacaaaaatctatacaaaaaaatcaatgaaacaaggagttggttctttcagaaaatcaataagatttaaaaacccgggctggagagatggctcagagcttaagaacaccagttgttcttccagaggtcctgagttcaattcccagcaaccacatggtggctcacaaccatccgtaatgagatctggtgccctctttgggtgtggagatatacatggaagcagaataatgttgtatgcataataaataaataaaatatatttaaaaacccaagttaactaaaagaaggagaaaatatctaaattaataaaattagaggcacaaagggagacataaaaacagatactgaggaaatccaaagaatcataaggacatctttaaaaatctgtattccaccaactggaaaacctaggctactgttctgctgaaagaatgcaacagaaaattaactcctaatgtcatcctgctgtactcatagatcagcatcttctacagacatcatctgagaagattcctcctatagtagataggaacacatacagagcctcacagaaagacattatacagagagagaaagaccttggaggaacacatacaatggtatgtctccatcaaatccatctcctcaggactcagggaaccttacagaagaggaggcaaaaaaagagcaagagaggatagagaatacaacatgtctgatgcacatatgcattcacagagactgtggcaaaatgtacaaggcctgcatgggtcttcaccagatggaggacacaagcccccatccataatatagtctccaactcataactgctcaaaacagaaaaatcagctttctccaatgaagtctaacttaaggatacaaaacactgttaagggccgttcccatgaccagcagcagatagatggccaaaacaaagcaaactcagtggtttgtatgggtttttcttctcattttattatttacctcaggtctttacccatgtattatggtttctgattctgtttgtatggtgtgtgtgtgtgtgtgcgtgtttcttggtgtcattgtatgttccttatactttttctttggatcctctttttctatttgttttgtctctggtttgttcttatttcactttttcattgttatttttacatgcttgtttttattccaatgagaaagcaaaacaaatggtataaagtaaatgccattaagaaatcttaggccctgataaagtccagggtttagcaatttagcattgaattgaaaaaaatatgttgtaagggagtcatatcaatcaattaaagagatagagaggatacaggaaaacaagatgtcacgaaagtcaaagaaaattatgtttaagtggggcaacaggaaagatggagcaatctctctgacagcacagaattactaaagtgagaggagctcattactgtccatagcaagatatttcagtggtgagatggaaggattaagattgcaatggattgcaaagtgggtaggaaaaatttacaataactctaggagaattggttgtcatagaagaaagaaaatatgtcagtaattacaggtggtaaaaaaataacatttaaaggcagtttaaaaccacctcattaatatataagtagtttaaaaatgaataaatattcatgcatctaaatacttactaaataaactgatatttttttaaatgcccagatccacaatagggaatccatatctggtataaaaattcaaataaaaaagcatacctggccgggcattgagggttcatgcctttaatcccagcactggggaggcagaggcaggcagatctctgtgagtttgaggccagcctggtctccagagtgagtgccaggataggctccaaagctacacagagaaaccctgtctggaaaaaacaaaacaaaacaacaacaacaacaaaaagcatacccgaagatgtcttatacactagggaaaagttaatgtttttttagatggattatcagaatgccaagctaccttcaaccttataaatatttgtatttataatcatagacaaaccgtcaggatatctagagaagctacgttgcataataaacagtctcatgtacacagacgatatatgctttttcaaggtagtgagaatttctgatggttaactcctcaaccctaaatagaacattcacatggccacctctttgtctgggggtcacagagtagtaggagaatggaaggagggggaggaggaggagaaggagaaaaggaagaagttgaaaaagaacaagaacaagaagaaaaacaagaaggaagaagaacaacaagaagaagaaaaaggaagacaaatgatactgacttctgtgcatggcagggaattaggttatgacctcacaccagctgtggatgcaagcaatgggccagtgctacaatggagccaacatcagtcacacacagattggagagagatccatagagtgcacctgtccctgctgaagcattagctacttttggggttttggaaaggagtaatcattgtcttctactgaatactcccgaagtgctcaacatgttccaggggataactccaaatccactgtcacagaagtgattcaggcgaccaggagatggggagaggaggaaggagaagaagaaaagaaaactatggagaggaagggagttggcaagtgtggaagggaaaacagagtgtgggttagaattatttatacatacacacacacacacacacacacacacacacacacacacacgagtaaggggtactgggaaaagatagatatttattgaaatgaaaaggaaaatgaaacattcaggactctatgttaaatccccatctggtctttctaaatcacacctacaatttcccaaagaagtaatgaacaaaatactttcactatacatcacttttatgatacattcaatttatattaatagaattaattatttttctagtatttaactcaattagtgaatgtttatgttcaataagtagcagcttgactaataaagttttattgcttattagcataaattcccaggagtagtgcctgattaacttcctaccaatggaaaaaggattgcttccagttttaactactgtgaaaaatacacctatgaaccttcttataactgtttggttggcagttgctttgtgtgggacatttttgcagatacacctggacttccatttattatagttacataagggatttggatggggaagtaaggaagtagaaacagaataccactttatagcttattctgattttcaactcagtcctcctgcctagttatccaaagggcttgggttagagatgtgttcctggtatcataatgggttatagattgtcagtatattcagtctaaaaaatgctataaatgaagccattaccttttaaataggtcagaccaaaatgcatgggcctgtcatttccctgtgtgtatactaaatatgtttacttctcctttggttggtattgttagggtttaaacacagtatatgctaaatttctatgataatggcctttgtccttttgcatatagtgggggctcaggtttgtgagggtgctcatagaggttatgcatactgcacgtgtggaggtcagagcacaacttcaccttagaggtcatttcccagttgtggtttctcaggtgctgcccattttgtgttttgagaaagggtattttatttacctagaactaagcaagtaggccaagctggctggccagtgaccctcaggggcttctcagcttttcctccctgtcctagggttacaagctcagcccagcactgccagctggtcagtgtgagcagaaatgatcagactcaggtgttcatgcttgcacagtaagcattttcccaagtgaattctcactttggcaatttttcccttatattttaaaatggcggtatatttttcactgtattattacccttccatttctttgaaatactcaatttcactttagaatccttcaaatgatctccattccacctagtttgtactttaacttcaattgatacacttaggaaaatatttctcttctctttttttttttctcaacaatattaaaatttgttattgtcattgagttagcaggaccatcttctacatttttccactagaatttttacaaataaaatacaaaataagtgaactaatagctttcagaataacatggtaattcaaagcttagtgatagagtttatgtgtaacaaagtcctggggaaattgaacttttcttcaagctgctctctctttaaagtggttctggcataattgtaatgttcatagcagcattacttataatagccagaacctggaagcaacctagatgcccctcaaatgaagaatggatagagaaaatggttaactcctcaaccnnnnnnnnnnnnnnnnnnnnnnnnnnnnnnnnnnnnnnnnnnnnnnnnnnnnnnnnnnnnnnnnnnnnnnnnnnnnnnnnnnnnnnnnnnnnnnnnnnnnnaactagaagaaaccattctgagtgaggtaacccaatcacaaaaaaacaaacatgatatgtactcactcatatgtggattttaggcatagagtgaaggattaccagcctacaatctgaactgccagagaagctagtaaacaaggaggaccctaagagagacatacattgtcccctggagaaggggaaagggacacgatctcctgagcaaattgggggcaagggaggtgggggaagggatctaggagaatgagaaggggagaagaggagggatgcaccggacatgagcaagcagaaaggttgagtcaggggaagaatagaagataacaaaaatggagatatcataatagagggagacattttaggtttacagaaaaatcaggcactagggaaaggtctggagatctacaaagatgacaccaactaacaatctaagcaacaggggagaggctaccttaaatgctctcccctgataatgagattgatgactgtcttatatgccattctatggcattcatccagcagctggtgaaagtagaatcagacatccacaactaatcattgaactgaactggaatccagttgcagagaagaatgattgatgggcataggggtccagaccaggctggtgaaacccacagaaacagctgacctgaacaacgaggagtgcttggtccccagactgatagctgggaaagcagcatgggactgatcccaggaatgtgggtttcagtaaggagacctcagaaatctatgagacctcctgtagttcagtacttatccctagcataggtgtggactttgggagcccattccatatagaggaatactccctgagccaagacacacacacagggggtggacctaggccctatcccaaaggatatgatagactctgatgaccccctatggaaggcctcaccctcccctggggagcagaaaggatatgtgataggtagggttttaattgggggcagggtgaggggaggagaggagagagtgggagctgtgattgacatgtaaaacaatcttgtttctaattcaaatgaaaaaataaagaaaaaaataaagtggttctggctatggtagggaggactgcaatggattatgagtcacgaactgctaacagtggtgaatacaaacacattgttctttttttcctttgtatccaaattttattagtctataaactatatatcacaattttagtgaaactttgtcagcctccattgtatcctgcgagtcatatcagtattcatctctcccctttatctgctcattttaaaaagtcacagatttcaaattatgtcttgaaagcctaaactccactgcttctcaagcatggtgcatgtgttttagtgaagtcatattgtactatgtacatatgtaaatatgtactatttacatggttctatgtaaatttcctgtacagatgattgcttcttaaacatattttactatgcccttttgtatatcctattataagtagggttttttcttttttaatttttttatttaaattagaaacaagcttgtttttacatgtcaatccctgttccttcttcctcccctcctcttctgcccccactaacaccctacctatccaataccatttctgctgtccagggagagtgaagccttccatggtgggggtcttcagagtctgtcatatcctttgggataggtcctaggccctcctctgtgtatctaggctgagggagtatccatccatgttaaatgggatcccaaagtccattcctacactagaaataagtactgatctactacaagaggccccttatatttctgaggcctcctcactgacacccacattcatggattctgaatcagtccatgctggtttcccagtgatcagtctgggggccgatggctccctcttgttcaggtcagctgtttctgtgggtttcactatgggggtcttgacccctttgctcatcactcctccttctctgaaactggattcaagttcagttcagttcagtttttaactgacaaacacattgttcttaaaggtcattggaaagtttaggcttaactattttagtaaataagtgatgagcaagatattttgctttacaaacatctgaaataagttggaattcagtcttcacattaataaacatctttgtgacatgccaagaagctgaaatatgcaaagtttgatttcctacacagtccattttccacaaaagacagaattgttgaattacatttcttgtttttcagctgtaaactcttacatttcaatttggggcacaattaggggtgttataaaagatttttatggtctttcgcccagtctcagagccaattattgtactgtttgaatattcagcaagtcgttaaaatattgctcatttcccttgttatttacttcttgctaaaactgttataataaattgtggctgcactcacagtgatttgcttacagtttctataatgtactcaacagtcaaggaaaaatattgctctgttgagtgtcagaataaaaatgaagggtgcatgagcactgtcagagtgagtatctcagtccttattccaggaggtatgctgtaacactcaactccagttttggaatcttggtggctgaagcactgtttcctaacagaaggtgctcaggaggcaggaggggaatgtctgctaagacatacaaatagaaatacccagaatgcacttcatcactgagaaaatgttgtcttccatcttaattttcaggacacaaagaataaaactataaagtataaaaatgtttgtggaagacttcatcttttctatagaacttaggtgcatgtttctctgagactattgttctctccctgcactgcttgattctaaagccatttcttaaccacatagtctctaatggagaaaaaacagggaattagagaatgatgcactgaacgtagaatccacagaaatgttcacatttcctaaaacctcagacatacacatttttaattgtcttaatgggttaaattagacctttgcattacatattacacacaattactttcatttcttttcattaccttattcatattataacagccattgtatgaatatttacagttatttaatcttcctattaattaataatgacataagtcctactatggatgagaaccacaatatccatgtgaaatatttgaggtagatgagtttactctgtacactctgtttttaagaaaaatgtttttacttagtagaattttttacattgtgttatcaacacacagtctctgaattttcaacatgtcaagtaaatagaagtttacaaaatttacaattttgttgcataaattcatgtctctctaccaatgataatatgaatgtatgttcatgtctgaatgaaattatcatttaaaggttttgttgttgctactcttatttatttttgttattaccaaaatcttacttatgaataggaactaattgagtactcaatgacattttgggcaaaattttctcaatttaatcttttgattttatctcaaaaactaacaaaatattcatcataaaattaactttgcatgcctgcaggtaatgcatacctgtccaggagggaaaaacaaagacaaaacatagagtaatggatttatctttagttgattaaatcccccactgtttagatgaggtttagcttttccaaaggttagaccttcaacctgtctatcatatgagactttgggaaaccttagctgcaaaagtgggcaagaaaactagaagctaaaattgccactgttccaaaaaaagaaaaagacaacatttctttaaaaaggtaaggaaaataaaaactcattttgtttccatatagcatttttacaagtcactgattggctccacaaatgaatagcatcctctattgatgagagttttcagtaagtgaccttgtgagaacatgtatgaataatctgttctccaattttcacatctcttgaaaccgatgaagatcaatgttcttttcttccacttgttgtgtggtcgcatttacccatttcccccatccagcttcccatttgccaccaaacttaccctctttctgactcaatgtctttgttttgtttcgttttataaaacattaagtacagttagtgctgtccacaaaagcataggtgaagacatccactagagcatggaaaatctaccccaaatgccacatcctcaaaagagagcaattctcttctcccaacagttatctaatgccaatagctcctcagtatggagctttcctgatcctgtgcaggtcttgtgcagataacctcagatggtgtgagtttgtgagtgaaagagcaacatcatggccaacaaacagcatttcacagaactcctccccatcctcctgctcttacagtctttctgtcatctcttcctgggtgttgcctaatcctctgtggtgatggtagtgggggcttgataaagatgttccacaagaaaataatgcctacatagcttgtgatatggcttacatggttgcagtatttttctgctttgttctcaaatttcagaaactgttgcctttgatccccagttatgccttaacttaaataggatagactttccttggtttgggattgtgaaaatgctaagtaaggccatgtagacaggaatccagcttagatggtctctctcctgaaaaggagaaagctgtggaagggttgaacagactgaaacatatgtccaagaatcaaaaggaaacatgagtaagttatattaaaatattattaaggtttcactgatcagttataatgactttacaatttagagactatggacaaagatcctgcagtggcttgagatgaagcaaagaatacattctaatggcctaatatatttgagtgaaggagttaagaggaaggagaaaagaatagtttaaaaatgtccctgtaatgaggtagaaatgaaggacatcaccattaaaggacctcataggtactgtgcaccaaggactgttagagggactaatatcaccaaaacacaagatcacaagaagccagtgttctccaaaatagccagtaagcttttctatggaaataaatgcacatgcaatcagactgatagacttttcattccacccaatagttgctcttgttgtctatgtattaataaatgcctaataaatcaaatagctccacagaaacaggtaatatttgaaactcaatgccagaaactaggtagaagttgtaaaaagtggtgattacttttgaaagtgattattttaatcgatgcctaaattatgttggtcatttagtgaaagtagaaattttgagtagcattcaatatatgtgtaatcagttcagatgactaaatatttctaagaataaataaggaccagacaaagttaaattgaatgaatatgtagagattcagtaagaaaacacagttttttccaaagatttagaattccaggaataggtgaggataggaagccaggaacaggagacctgaagggaatgttaacaagtgcaatgttataacaagttgctatgaagatagaggccattgtacccagcagtagtaaatggaaacaataaccaaaagaagttcagcctgtgtggcatacagcttgtaaacaggggagaaaagcaaaagaagagccctggtccttgaagaacaataacaggtcttaaaagaagagtcactagggaatgaggactgtctgtctacattgctagtgccagagtttacagaggacttacagatcatgtcaagctttatactctacttctagctgataatttcccacttggttctaggaaaaactgtgttatgaagactgtgaagaaaccttaaatctcttctaaaaccatgtggctggtaagtccactttataactcatgcctacacaagcagactcaacattgtcatcgggcactgccctgcatgatgttccctgattatgggtcagtgcatagagagtggtgcaacaatcatagtgaagataattttatatcattgagttctgcagaaatgactcagttaagacatttgccattcttcctgagtaccagagattgtttgccacaacccatgactcaccaacactcacaagagcctgtagctccagctccaggtgatatgtaacacgctactcctcctgatgggcacctgcacacactggtgcttacacacatgcactcacatatactcacccatacacaaataaaagcaaaatattttaaaggtttttgaataactttatagctcaagagatttttaagggacatcaacacagatgctaaatgttgtcagctgagtaagaaaagcatccagaaatcatgacaaggggatgaggaaagaaatgactaaacaaaatattataggtaaccaaaaaggtaactaacataagggaataatgttccaacacaagaagaaggacaatgatgggttcccaggagtatattacaaggtagaaagaaatggataacatagaaatttcaggaactctgtttaccagagaaaaaggtccacaggcataataagaagcagcaggtggaagcaagcatgaagagaatgggctgagaggatggcaacaccatgaactgagattatgatatagggagctaaccacaccaaccccagtctgagacatcaggccagctactaaatctctccttgtttctgtttccgtgaagagaatctggtaatacccatacagaaatcttattagaaccatgagtgtagtattctgagtaattctcacagtctaagaaaggcaatgaattaataccagaccttaagccttctggatgcctctgtgtctcttcttgggtcctgacctacacaaccatggtgtgtacagggtattatagcaccatcactatttttgtgcctgaaattttcaaaataaacacacacatatttctctaaaattctctaaaaggaaagtactccataagctgactaccacacatttctcccttctaacacaaagaaagtcaacttctcttaaagttttccaggaaaagtgattcgaaaaatgcccttgctaatgtgtttcatctcagcgtattcccttgtacgaatcataatgaaagaatactgctggggtgccaaaacctaaaaccaactgtccactgctgagatgctaagtaggcagggtactaattcactgtgcttcctttgtctttttagaggtcactgtaacagaacaatcccaacggaggtgatgcccaccagctaacagtgattattcagcacaaaggaacatatgcaccatgtgaacaagagccaaaaggtgctgattatagaatggtttaaaaataaaatagacagagccaaaaataactcaacaacttaaagaacagcctcagcttcactttgatggcatgtccccttaacttcttcaatcagaaatattcttttatgcattcatccagtcatcagcccagtgaatactggagtgcctaatattctcagtgctgtactgaattacagggatatttataacaaagagcaatattatatttgagacataaggacaaacattattttgctttgatgatgtgaaggagtacaattaataaaaatattcttgttagccctagtttttgaacagtagagaaagaatgaggcagatggaggttgaaatgtcagctgtatcctgatgtctctgtctcacgggaacagaggtctacctcattctgccttccagaattagacatacacttcctaagacagcaatacatcaaagagcagtcacactgtcccttcagtgtcctccctatatgccctgtttctgaaactcttgtgacatgagcaatggactgaaatcctggagtttaatgcgcaaggcaatcatcatgaaactcatccttcccacactgagtaccatagccaggtagctgcagaaagctctgcacatcaaaagcctgtctctctatccctgggatctgtgctacacttgagcaaaggactacagcagaaatgaaggtgtgccttttgaaaccctaggcctcccaaagccttacagatttgttttgttttttgttataaatgcagccctgacaagaacaaagccaagcttgcctgctaaagggtgaatgatgatttagcgcaaagatgagccctaagtagcccatcctgatccagccaagctcaactattaagtgttgtggctgatgaatgatgaataagcaaagaccagtgtgatcagcggaagagccaagctggcctcacacagcagcattcagtctctgaaacactgaaacactgatgttttgtcatacatcagtaatatcttgatatgctggcatctaatgacccattttctattattaaattctagacttgaagctctaaggcatgtgtaccaggagatataaacagtggtgttcatgccagaacattttgtaagaatacaatacaaatgtaaaacaaatcaaaaattttaaattagtattaaataagagctaaaagtagatataacatatgactcaatgggggcttacatggctttggaaactgacaattaaaaacacaggtgtcaccatgggtaaattctcaagtgaaaagtcatacagtgtcagctaaatgaaaggtttttcatacaagaacaataagagatcaaactgtaaaatagtattaagaggtatgtacaagatgggaaagtgtcttttaaaagatgatgaggaaacccagtcatggtttaggatagtaatcatttctagatatctaggagaaagacattggagtaaaataaaccagagacttcccagataccaaaaatattctgggtcttattttgttattatcattgatagtttatcaaacatgtattctgtaaatacattgtatgagagacagttttaagttacattcatttatttatttgtgtgtagaggtgtacatatatggaggtcagaggacaatatgaagcagtttattctcactaccatgtgaacctggggatggagctcacttagtcaagactggcagaaatttattttactgagtcaccttggtggtctaagagataatttatttaagtaaaatgatttaaaagagtcaaaatggaaatgagggaatcagtcacagggcactataacagtatacatgtgatgtttgatatatggctatgctaaataaatgtgatttctgtgaattatattaagaatactgtattaggacatcagaggttgagtgttagtggctaagcactatgtgttaattatgttaatgaaataaatagtaaaaaagacaaaccaaaggtatgcgggctgtatagataaatagcctatttttccatggatttgtcaaactaacagatgtatataaagtaacatttaaaacaaatggagcagttctgaaaggatatgtaagaaacaagcacagcaaggccctttagcactgaacagttgtaacaaaggacaactgtaaagaagacattgctgtgccccagaggacaactgaaacagtgaaatgcattgtaaagactaaggagatactgcggtgtgctataagacaattgaaacaaatagagacattgtaaatactgcaaaggagacatagcagagtactgtaggaaaactaaaactatgaagagcagggaagatgcatcataaactagttaacaaagttcaaaagttacctactcaatactaaacagccactaccaccattccatctctaacccctaatacagtgttgtcacacattctgcaatagcaacattcatatttagaccagcataaagcaaccaaaccaatggtttaaaaattatacttatgaattagaaaaatgactcagattaatcaaactgaaagtcttggagaagattgtatattagaaatctcttatatggtaaacttggagttggatttccttatcaatgattcatcaaagtccccttctacatggtgtagagagactatcttgatgcaagtatggtgtgtgtgtgtgtgtgtgtgtgtgtgtgtgtgtgtgtgtgtgtgtgtgtgtgtgtatggttgcagtattttnnnnnnnnnnnnnnnnnnnnnnnnnnnnnnnnnnnnnnnnnnnnnnnnnnnnnnnnnnnnnnnnnnnnnnnnnnnnnnnnnnnnnnnnnnnnnnnnnnnnnnnnnnnnnnnnnnnnnnnnnnnnnnnnnnnnnnnnnnnnnnnnnnnnnnnnnnnnnnnnnnnnnnnnnnnnnnnnnnnnnnnnnnnnnnnnnnnnnnnnnnnnnnnnnnnnnnnnnnnnnnnnnnnnnnnnnnnnnnnnnnnnnnnnnnnnnnnnnnnnnnnnnnnnnnnnnnnnnnnnnnnnnnnnnnnnnnnnnnnnnnnnnnnnnnnnnnnnnnnnnnnnnnnnnnnnnnnnnnnnnnnnnnnnnnnnnnnnnnnnnnnnnnnnnnnnnnnnnnnnnnnnnnnnnnnnnnnnnnnnnnnnnnnnnnnnnnnnnnnnnnnnnnnnnnnnnnnnnnnntggtgtgtgtgtgtgtgtgtgtgtgtgtgtgtgtgtgtgtgtgtgtgtgtgtgtgtgtgtttaaaaccattccacaatcatttatatgtttaaaggttatacaagcaaaaaatgcattcacactgagaagtttcttgagtgtcataataaattgctcggtgataagtcatattcagatcatttaatgttggataacatgaaacaagtcagtttaccataaaggtagataattgattacagcgaagtttaagccacaaatagacttccagctactaactactgatgagtgacgcatatatttttttttaagttgcaggatagagtttctccttatcctattgtcagcctcaatgttttccaatctcagagtagacaatgccccacttaaaaaacagaaacccagctccaaatgatcaaaggtgaaggttgagattgactggtgctactgggtcccgtggtaacttttgaggttccctttagtgtctttgggtttatgaccacaggactcctcaagaaacattccatgccacccttgctccttaatccatttactccaacatatttgctctaggctgccttgcttctcagtcctcagcattgacccaatatacttctcattatctcaattatgagatttgtttggtcatgtttattgccactctattaacaacagctgagcatggaaacaacctaggtatccatgaactgatgaatggataacgaaaatgtggtacatgtacatagcattcagctataaagaaaaactgaaatcatgaaatttgcagtgaaatggatagaactagaaaatgttatactgattgaggtaacacagtctcagaaagacaaatgcttcaggcaatgcattctctcatctgtggatctagcttcaaatcttcatgttggagtagatagattggaataacctcagaaattagggaggtaaaaagggaacacaggaagtgagtaccagaaattggagtactcagatacaaatgctatgaagtaaatttcaagattctattgttttttctgctgagtagtactccattgtgtaaatgtaccacaatttctctatccattcttcagctgagaggcatctaggctgtttccagtttctggctagtacaaataatgctgctatgaacatggttgaacatatgtccttgttatatgaatgtgcttcttttgggtatatgcctaggagtggaattgctggatcttgtgatagactcattcccattttcttgaggagtcgccatactgatttccacagtggatgtacaagttggcactcccaccagcagtggaggagtgttcttatttctccacatcctatccagcataaactgtcattggtattttcgattttagacattctgacaggagtaagatggtgtctcaaagatgtttgtatttgcatttccctgatgactaaggatgttgaccactttctcatatgtctttcagctatttttgattcctctattgagaattgtctatttagttctgtacctcactttttaattggattgtttggtgtttgggggactagcttcttgagttttttgtatattttggagatcagacctctgtcagatgtggggttggtgaatatcttttcccaatctgtgggctgcccttttgtcttgatgattgtctcctttgccttacagaagcttctcagtttcaggaggtctcatttatcaattgttgacctcagtgtctgtgcttctggtgtaatgttcaggaagaagtctggtgtaatgttcannnnnnnnnnnnnnnnnnnnnnnnnnnnnnnnnnnnnnnnnnnnnnnnnnnnnnnnnnnnnnnnnnnnnnnnnnnnnnnnnnnnnnnnnnnnnnnnnnnnnnnnnnnnnnnnnnnnnnnnnnnnnnnnnnnnnnnnnnnnnnnnnnnnnnnnnnnnnnnnnnnnnnnnnnnnnnnnnnnnnnnnnnnnnnnnnnnnnnnnnnnnnnnnnnnnnnnnnnnnnnnnnnnnnnnnnnnnnnnnnnnnnnnnnnnnnnnnnnnnnnnnnnnnnnnnnnnnnnnnnnnnnnnnnnnnnnnnnnnnnnnnnnnnnnnnnnnnnnnnnnnnnnnnnnnnnnnnnnnnnnnnnnnnnnnnnnnnnnnnnnnnnnnnnnnnnnnnnnnnnnnnnnnnnnnnnnnnnnnnnnnnnnnnnnnnnnnnnnnnnnnnnnnnnnnnnnnnnnnnnnnnnnnnnnnnnnnnnnnnnnnnnnnnnnnnnnnnnnnnnnnnnnnnnnnnnnnnnnnnnnnnnnnnnnnnnnnnnnnnnnnnnnnnnnnnnnnnnnnnnnnnnnnnnnnnnnnnnnnnnnnnnnnnnnnnnnnnnnnnnnnnnnnnnnnnnnnnnnnnnnnnnnnnnnnnnnnnnnnnnnnnnnnnnnnnnnnnnnnnnnnnnnnnnnnnnnnnnnnnnnnnnnnnnnnnnnnnnnnnnnnnnnnnnnnnnnnnnnnnnnnnnnnnnnnnnnnnnnnnnnnnnnnnnnnttggcaattgtaaagggtgatgcttctctgatttctttctccaccaatgtgtcatcggtgtatagtagtgctatggatttttttttagttaatcttatatcctgccactttgttgaaggtgtttatcagctgtaggagttccctggttgagttttttgggtcacttatgtagactatcatatcatctgcaaatagtgaaagtttgacttcttcctttctgatttgtattcccttgatctccttttgttgtcttattgctctggttagaacttcatggacaatattgaagaggtatggagagagtggacagccttgtcttgcccctgattttagaggaattatattgagtttctctccatttaatttgatgttggctattggcttgctgtatnnnnnnnnnnnnnnnnnnnnnnnnnnnnnnnnnnnnnnnnnnnnnnnnnnnnnnnnnnnnnnnnnnnnnnnnnnnnnnnnnnnnnnnnnnnnnnnnnnnnnnnnnnnnnnnnnnnnnnnnnnnnnnnnnnnnnnnnnnnnnntttttttcctcagtctgtttatatggtggattatattgatggatttttgtatgttgaaccatacttgcatccctgggatgaatcctacttgatcgggatggatttctttgatgtgttcttggattcgatttgccaatattttattgagaatttttgtgtcaatgttcgtgagggatattggtctgtagttctctttcttagttgtgtctttgtgtggcttgtgtatcaaggtaattgtggcctcatagaaagagtttggtaatgacctttctgcttctattgtgtggaattctttgaggagatttggtattagctgtactttgaatttctggtagaattctgcactgaagnnnnnnnnnnnnnnnnnnnnnnnnnnnnnnnnnnnnnnnnnnnnnnnnnnnnnatttccttagaggttataggtctatttaagttgcttatcggttcttgatttaattttggaaagtgaaatctgtccagaaaattgtccatttcctttagattttcaaattttgaggaatataggttttcaaagtatgacctgatgattctctggatttccaattttattaatatgtactctttgttgtttgattagtttggataaaggtttgtctatcttgttgattttctcgaagaaccaactttttgttatattgattctttttattattctcctagcttcaattttattgatttcagccctcaatttgattatttcctggcgtctgctccnnnnnnnnnnnnnnnnnnnnnnnnnnnnnnnnnnnnnnnnnnnnnnnnnnnnnnnnnnnnnnnnnnnnnnnnnnnnnnnnnnnnnnnnnnnnnnnnnnntgggcatttagcgctatgaactttcctcttagtactgctttcagaggtttggatatgttgtgtccgcattctcattgaattctaggaaatctttaatttctttttttattacttcctggacccatgaattgtgcaattgggtgttacttaatttccatgagattgaaggttttctgtagttcttgttgttattgaattctaatttttaagcagtggtctgataaaacacaggggtttatttcaattcttttgtacttgttgaggtttgctatgttgccaaatatgtggtccattttagagaaggttccatgtggcactgagaagaaggtaatttgttttgtatttgggtggaatgttctatagatatatgttaagtcgaattgtgccataacttctattagttcttttgtttctttgttaagtttctgtctggtgttcctgtcctgtggtgagagaggggtgttgaaatctcccactgtaagtgtgtgcggttttagtgtgatttgagttttagtaatgtttcttttacaaatgtggatggcttttgtatttggggcataaatgttcagaattgagatttggtcgtgatggctttctcctgtgatgagtaggaaatgaccttcttcatctcttttgactgattttagtttaaagtccaatttgttggatattaggattgctacccccacttgtttcttgggtccatttgattggaagatttttccccaacctttaattcttaggtaccgtctnnnnnnnnnnnntgagtttcttgtatgcagcagaaggaaggattctgtcttcttatccattctgctaatctgtgtctttttataggggagttaatatcattaatgttgatggatattaatgaccattggttattgttcattgttgtttgtttttgatttagtgatggtggcaaaatgatgtgtgggattctatcccttttttcttttgattgttggaaaattgggattatctattgcctttgtttttctggcaaaagttgtagttaacttccctgggttgcagtttaccttctagtactttctttagggctggattggtggaaatgtattgtttgaatctggttttatcatggaatatcttgttttctctgtctataatgattgaaagctttgctgggtatagtagtctgggctggcatccatggtctcttagtgtaggtagaatatcgatccaggaccttctggctttcagagtttccatggaaaagtcaggggtgattctgataggtttgcctttataggttacttgacctttttcctttgctgctcttaatattttctctttgttgtgtgtgtttggtgttttgattatgtggtgaggagaccttttttgttcagtctatttgttgttctgtaggcttcttgtattttcatgagcatatctttctttaggttggggaagttttcttctatgattttgttgaatattttttctgcacctttgagttggatttcttctccttcttctatacctactattcttaggtttggtcttttcatatgaattttagacatagagcaaaggattcacagtatcccatatttcctggatattttgttttagggatttgctgggtttaaaattttctttggctgatgagtctatttcctctagagtatcttcaactcctgatgaggtattactggtgtatggttcctagtctccagtggtgttatattgggttttctgttgttggatgtgcttttaccttgtcctcttctcatcctttcttctggtgggtgtagcaagtgtttcttgttctcctgatgggtgtggggccacgtttcccttctggtagatgcaaacagatccaatactctgatttaggttctcttctcgtggatggaggtgtcactgttacccgggtgtcggcaatgtctgggcgtgccgggtcccgctgggagggcagttggaggcagagctgtcactgggcctcaggttgtcagatccccctgccgaactccttaaggacacttgtgtcagatgactctgagcagcgatgatgaaccagaactggaaacagttcctggcctacctgggccggcagatgtaggccgggctgcctctgggtgttcggtgttcgtaacctgccaccaccgaactaggtccggcaggcaggtcgattgtgtcagatgactccgtatcttcttatgttttacttttatgattgttaattttggatactttacactgttaagttttaatcatcttttagactaaaaggggaattgtaggggaagctgtagccatgcctacttagggactggctgcagatgtgcctgaccacgctttctcttttggtttcacttttgtacttgcggtacagactgctgccacaccggcctgctaggttgctctgtaagtcaggcttttccctattaaatacccttatatttctacttggctccatattggtaatttcccactatagccatgtttaaattttgcaagaggaatgaataggttttaattgtgagcttgtcatagatattgctaagtagattagtcttttgctgcaaagttgatacttggcttcagaacaagatggaattagtatttatggcatatctgtaagtttcaggcctctacattttttgtttaagtcaaattgaataccatcgtggaatgtattaagtactttttaaagttataatcatggaatattaaaatttccccaatctcatcattttatattattgtattgatctatgttcatgtactattttagttttaattgatatgatgattttgtatatttgtgggtgatgtgtgggtgtgatgctttatgtatatgcaatgcaggtatgcatatactatgggagatgtcattgtgtaaatatgtttatctttttggttgtcgaataaaacactgttggccaatagggcagcaagataggtaggaccaggatatgaggaggattctagaaagtgtaggcagagaggaatcatcgtgtgatcccaggaagtggtgtagttgggcagaaactgccactagataaccatagaggtctagaggtctgtacagacaggcaggaagtgatgtagctgggtagaatcaaagtataagcagggacaaacaggaaattgttttcttcttctctcttcattgctgagacactgaacagtcaagatttaggatgccagagagtaagaggtccctggacctttctccagtaagattaagaccacgtggaaatgcatggattattagaaaatgggtcaataattaaggctgatctagcaaataagaaaccttagccaatggccaacagctttataattaatataagtcttgtgtgttaatttgggacccagacaactggtggaaaagactacacataacacatatatgcacatatataatcagtcctaatgggatcattcaggatcctctcttccatttatgtttagaatataataagggctgaagatattatctcagtgattaagagagagtgttgcttttacagtggacccaggtttgattcccatcagtaactctagctccagtggacctcatgaccttttttgattccattaataccaggtccacacatggcataaacacacatacacatgaaataaaataaattaacctattccatgtgttatggtgaagtttagtcataggctgaattagaaggagaaagtgagcttagcatcagcattcatcgtgttctgctttctaactaaggatgccatgtgactaggggccctctgttcttgtcactatgcttttcttgtattctgttggttatgcttacatctgtattcccccaaacaatgagcaacaataaacccttcctctcttaaggtgattcttgtcctgtgtattgtcatagtgaaagcacaggtgactaattcagacagaattaaatctgcattgaattgtaactctgatacattagttacttgattttcagggattaactgctgtatacttactttttctatctgttgtatggaactgataatataaatctcatgctcttttaatgtatacatcaagaaatacacaaaaattgtccaggtcactattgcataacactataagtagaatttctcaattatagggcacaggtgttttgtaatgtgatatttaatttttaaacattaacaaaaatataatattttacactattgtaattgccttcacaaatagtaatccacttaatttttcaaattgtaatacaactaacttatattagttatagtctagaaagcagcttattcaaaatgaaaatttaattttttaaattatattactcattcctcataggatgaatcattattttattttaatgagacaagaaaaactttgctgtcatgtctgtcttctgtttctaggaagaaatcaattttgtaaacatctggatgagaaaagggtaaactttttaattgattaatattgtaatgtccaatgagtgggcacatgaagatccagagagtaggctcttcttcctcagagctgcctggcttgcactcatgcttaacccatagaaaagagccgagcaggtaacagtctcattcttgctttataggactttcaaaagcacctgaaatttaaatatctatgtctcctccccatctctctcttttttccttctccctctccactctcctttcttggttcacatgtagagatcagaatatatcttgtaggagatggatctttcaatcatgtgtgccccatcatcaaagtgaaataaataccttcagattgtgcagcaagtgccttcacttgctaaagcatcttggcagctcctttctggtatttctaatctgagcatttagagacaacaggaatgagaaaaattggggagagaaagaaaagttgatattaggtggaaaaaagccctcttgagtcaatacacaattagtgtcattaaataattactaaagatgaatgttagatgagcatgcttagtgtttgtagaggcactaattagttaattatgaaaagctaaaccaacataaaacctctctaagtgccttttcctttcatagttttgtttttaaatatgacatgatcacatgatctcctagggaaatgtgaacaattaactaaacaaataaacaattgcactatgtccagcttgatgaacctctgggattcctggggttagaggagcatggaaaagtccactccagaagaagggtgaggactcacgaaagctacatttcccgcagtgcctttgctggcagccatgtcacggaggaacttccttgtccagcaactgattactgtctgtatcacttagaggaggtgatccttgagtcttgtaacttcttcatgcaatttcactgccagtcttttgctgtccacaagggaatgttccattgtagagaaaatcaacccacaacaaatatcactgtacaaaaaagaaaatcttctcaccacatgtaccaaacaataatgagccaaatacctagaaagcctcaagtcaaattagggttctagcaataggaggctattttatacaatataacagtgttcacatgtatttttgaattaatagaaacaatgatgtctctctaataattatttggtgtcagtgagcgggatgaccccatgccccaaggttcccagagaaagagggaaacctccaccacagcctgccctgttgtgccactgagaggcatcagagcagtttccatatgcttgagccatccccgtgcttctgggctttagactcggcactcccaagatgataaagacagatccagataaagaaaaacctctaaaggtttacactgcattgaaaaatatatgtaggcttgcgagagaaaaaaataacaggaggaaatagagtagccggttgtggtggcacacaccagtaggatttgctgaaggaagcagaggcaggtggatttccacagagaaaccctgtctcgaggaaaaaagaaacaaaagaaagtaaaaataaagtattaaaaaagccatataaagatggaaaatacatagagaatctggatactatatgccatattgttgtctttaaatggtttgattgccgaggaaaaacttattgctgctaaaatgtatttgattataaatactgctaaattaatccaacttatacatttttaaaatgctctaacttcaaaatttaagtctaaggacaggctacctagaaataaaggttttgcttgtatttccacagaaaataaaaaactgtggattccttccagactattatagtttgatcaagcaagaccccctgaagctaagacgatacagtcttacagactaaaaaaaacaaggacttggtcaggtttctatgttttatcagattcccatggtatagccnnnnnnnnnnnnnnnnnnnnnnnnnnnnnnnnnnnnnnnnnnnnnnnnnnnnnnnnnnnnnnnnnnnnnnnnnnnnnnnnnnnnnnnnnttagttataaatgataatgagcatagtcaatttctttttaaagaaagaaaaggggaataggatataggaatgaatactttgcattggttgatattttcatttattgatacaactttaaggtcaattttgtgatatgtatatgtctcctcttgtttaggtattgtgtttatacagatcttttacctataatagtcagaacttatgattaggttagttaggttttctagatatacagagatgtatttgagatggataggtattcttcgaacctttcaagaccttcagaaatatggcatttaaatggtttagggtttttcttggcagtaagacacaactgctcctggcacaccaattacgtcagaaaggaggatgagcatggaagaaactcattatggagtttgctttcaacatggcaagattagccatttgggcaagaaactgctcttgcctggactgaaactactcttgcctggactgtttgttgctgtataaactggatatgcaggacccacaaaaaagtgactgctgaacttacaaaacaagacagtactgaagggttcctgttaaaatggagaagtgtgctagacacactgtggcctatgggctgaagatggatgccccaatgttacagaggaactttgggtgactgtccacgtagcagatgtctctctcaaatctagagtttatatattatccttctatggtctttgatagagttaaagacagatagttatggttatagtcttcttcagttattataaaagataagttatcctttttatttagacagaaaagaggagataatggggaatgtactgtgtatgtttatcttattgattgttgaataaaatactgcttggccaatggcaagcaaggactaggagtcaaagaggattctgggaaatgtagtagagaagtgctgatccaggcaggaagtgacatagcaaggagactcctatttaagcaaaggagaagcaggaaggtcccctcttttcctattcacatcctccagcggcacaatgtgatccactggcaaggagggatgccaataaggcnnnnnnnnnnnnnnnnnnnnnnnnnnnnnnnnnnnnnnnnnnnnnnnnnnnttataaaatatataggtttatgataattaagactgagctaacagatgagaatcctagtcattggccaagcagcattgtacctaatacaagtttctgtgtattcatttgggccctaactcaggtgggtggctggcataaagctcacatgtggcggtggggctcaggcagcttttggcggaaagatttatcataacacatgactaaatctttaaggtattttaaagaaaaatagtgtattcacttgagaatggggaggtacggaagggtttggagggaggaactgtcaggaaaaagtagtgcaattctgtttcaattaaaaacatgcttctaaacatatttcaaaatgtggatatgtgggctggaaagacagcttcagcagttaagaacccatgcagttctttcagggacctgagttcagttcacagaacctacatcgggtggcatgtagttgtacctgtaactattttccagggggatattatgtccctgtcttccacagtcacttatcctatgtgccataccaccacagacacagacacacacacatgcacacacacacacacacacacacacacacacacacacacacacacgtgcatactctaatttttaaataataaaaataaatcttacaaatataatatatgtctgtatcatattttagaatataaatgaataatgggcttctaaaataaatatgaaaatatagatttcctttgattttacacaatcattttgacctatcccaaaatagatgacagcaaacatcagtcaattcctcttcatagatactaaacatggctatctacttaactatatgaaatccaagtaagatgtatttgtccactgacaaggattgtgtaaaggattgtgggggatcaataatatctgctgcaacgtcaacaatctgaaatttttgatgcattcattatcaggatttagcagatatttagtaactgtccttccaccttgaagtgctcagactgaatatgtaatggatgacataatgaaatgccaaggaaaactataaccaggaaggttttttatttaaattagaaacaatcttattttacatatcaatcccagttccctcctcctcccattctcccatgtcccccaccaactccctaatctatcctcaccagggagggtgagtccttgccaggatgttttttatttaaatacatcattttatttttaaatgtacttgaacacttgtttataaatttcctattgtacacatccaaatcttccatcaacatcttactaaccctctatttgctttccaaaaatgtttctccttctattaaaccacagtgagagccctgatatctaattacatatttacaagtactggctatatccactgataatgaagatgaaatgtgtgtgagtgagcagtttattccacattcaaacaaggagcaccacaatgcagaatcgctgtgctcagagcagcagtgctggaagtggagacatagcgtgacttgccccctcccttaacagccttagagcagctctgaacttccccagccaaggttccagatcttttaaatttccgttttatctctcttctactaacaggaattcattatctacccactaagtaaaagcaaataattacacaaaataaacagggaggtaattaattagtgtaataaacattaagcgattgttgtaatgtactaaaataacaagggatgcctgtctgtgccttgtgtttttcttcctaaggcaggagggaaatgttcttgcagccacagtgagctgccttttctgggattaaactgagcttcttacagtagagaaattgtgctttgttcttattttcattcccgactaagtggatggaaatttcatctttgtaatagagaaagactacttggaatgaagtgaaatttgaaaaaaataaataaataaacaagaacactaaccaaaaaaaaaaactggattttaatgataatgacctttactcttctctagtctaatttagttttatgatatttctctatagaccagctggttggagataggatttcccaagacccttcaagtgctgagaaatgaagtttaaagtctgagtctatcttaaagaaacaagggatagggattaacaggccaacaggaagggaagagagaaaatctggtaagtgatggtgcagagtgctgagagtcacaatctgatttgtggcacttgcagaaggaagaatgtctctgaaccaggacatcccagaccctggctgaactgaagtctttttttttttttaaacagaagtctcctgctttatctcatttcaatgcagtatggtgaatttcaggaaggaaggcatatttcatttatccatatcaactatgttaaattcactaagcttattatcttacactagactgctttcccatcacatatgtgagaatgctaaaagtcattttgactcctatagcatgaataataaaaacccagagacagaaattgaggttcaaggtgaagatcagagaagcaaagcagccacactatctgagagttcctacctctgtcaaggcttaaaggggcatcatgtcagaaacatggctggagacttactgcccaagactgaatactaaatgccctgcatctatcatatatacttctctaatgttgggattaaaggcatgaaatctgttattcttttagattgattcactttcatgtagccctgagtggccttgaactcacaaaactctgtttgcctgtgtctcttgaatcttgggtttaaaggtatgtgccattgctgcccagcttctatggttgtggctaattttatattctgatcttcagtggctttattagatcataaactatatatcaccacagacttcccagccaggactagataacaatgtttatagacagcaatatagctcaaagctgtaacagtgaaattaggttctagcttcaatgacccattagtatagtgcttctcaacctgtggatcatgacccctttgggggtctttatcagatatcccctacatgtagatatttactttatgactcataacaatagtaaaattacaattataaaataacaataaaataattacacaattgggggtcaccagaacatgaggaactgtattaaagggttgcagcattaggaaggttgacagccactgctttatttgatcttgtttctatccaaatatcatcaattttattcaatggtgataatccccactcttttaaatctagcagaaaggaatatgaaattgggaggaaannnnnnnnnnnnnnnnnnnnnnnnnnnnnnnnnnnnnnnnnnnnnnnnnnnnggtaaattgaatgggaagaggtggagtggatttgatcaatatattatttacatgtataaaattgtcaaaaaataaagaataaatgtattttttcttgagaagaaaagcaatatgtaagatactgggtattaaaatccctgatataccatggatatgtttaataaatttattcagaacgagagagagagagagaaattctgcttaataacactagtttggggatggtcttatgtatcccaggctggtcacaaactcactatgcactcaaagataaccttgaactctagatcctcttgcccctaaatcttccaactgctcaagttccaggcagaaacacattgccacatctagcttcaaataaaacgattcccttgcagtgacatctcttcaggtttctaatacaagctattgaacacatcccaagtgtacaggggaaaaaactaacaatacatttaacatgggagaaaaaccaatgatttgtaaagagtccaatgaaattgtcaaatttaataagtatccatggaaatggatgggtttgagaaaggttccttgattctgttgaataaacacagaacagtctgggaataactgtaaatagatacaatttcttttttattcctctgtgagacttctcaaagaccacaaacatatttgataaagggttctcttgtacctgtggcagtgaacagatgaatgctgaacatcaacagtaaaaatgtgacaaatataatgacacactgtaagatcacagtgacatgcacaataaagtatcagaaataaagaaaaaatgccctgacaagatgtcaagtgcagacactttcttatcaaaagagacaacaaaacacaattacagttcacagttcaggaaaaaaatatggatgacaaagaacagaaaggtctggtaacgaaacagtgatttcaaactaaatgtaacagaaaacaagacttctttgtctttggctggaagtgacagggacaaaaatggcatactcttggaaaaagaaatataattgattgcacaggtacaagagaaactgtgttatcaagtaggcagtgacaggggttatggcaggggggccctcatcaatgaagaacatagggctgctttgacacatgaggccaagtgattcccatgtgcagctttcannnnnnnnnnnnnnnnnnnnnnnnnnnnnnnnnnnnnnnnnnnnnnnnnnnnnnnnnnnnnnnnnnnnnnnnnaatccccttcaatgggctgccatatattgctttattaatgtcagatgcacactgtgagtaattcagtgtcataggtaattccaacattccctgtgagcccaaagatggtagaacttcctggcagtcatagaattacatagaagaaaaacaacagttcttattctttgacacattttaggaaataaatacaggtattgttatcataagtataaatacattctataatattagactactgaaatttgaacatgatgtaacacatacacatatcattcctatatcaaaaattctagcatgctgaaatacatggatcacaagttatattaataacatatgcatacaaatattttaagatagatagatagatagatagatagatagatagatagatagatgtgagaataaggggttaaagtcaagggatttcttccaatgagttaaaatttcttgaccatatttctaattgtataggtaacagttgtatcaatagtaaaataaacaccatcaggttagtataaacaacattagaataaaatgtcaatcattgaaaggggttttgctctgctggaaaatatattgtgtgtcttacagttagatactttatttaacaaaatttagcatccatatccccactccattatggttaacatagtttgaactggagagaaataaaaaaacatacagagaattttgtagcagtgttaataggatcttaaatggaaaatgaaagcctttagttatgaaaacttgaaacttaatactctcatttaaaagataaccataatcaccactaagaggcagcccaaatatatgggacctgtgtctccctttacctctgttctgcaataatctctgtcaataaggaccctggttctagaacatctgaatcaaaaatgatgcatttttgctcctgaatgatggtaaatctttggtccattatcaaaataaatcccattttccttaaagctaatcagcaaaactttacctggagagaaagattggaatagtttctgactattcttcccaggcctcctctctttcctgtggtgtgtttcatgctgctgtctccagtgcttcaactgctaaatcccatttcatcctggatcctaatattccccaaggcacagaaactgcagagacacttttccttttcagtacgcacaaaagtcctctgatacctttacaccacttgaggtaagatttggaggacactggggccatggcggcggtacaatcagagagtgcttgtcatataatcatgaagacctatctttggatctctgacactcgtagaaacatcagtgtgtaagggcatgtatctataatcctagtgctatggaagtacaatctggaggaactccagggctggctagtcaactagtccttccaagtctgagcagtggggtcagtgagaaatcctatctcaaaacataaggtagaaagcaacctagatgtccctcaactgaagaattgataaagaaaatctggtacatttacacaacggagtactactcagtggaaagaaatggaatcttgaaatttgcaagcaaatggatggaactagaagacaccatcctgagtgaggtaactcactcagaaagacaaacatagtatttactcactcatatatggatattagacatagagcaaaggatgaccagcttataatctacacctccggagaagctaggaaacaaggagcaccaaagagagccatgcatggtctcccagagaaggggaaagggacgagatctcctgagccaattgggagcatgggggaagaggagagggagttaggagaaatataagggagaagaggagggggtagagaaggacatgggggcaggaagattgagtcagggagggagggaaatagaggaaagcaagaaaagagataccataatagagggagccattatagggttaaaggaaatctggcactagggaaatgtccagagacctacaaggatgacaccaattaacaatctaagcaatagtggagaggctaccttaaatgaccttctccaacaaatgagattgttgactaccttatatgccaccctaaaaccttcatccagtatctgatggaaacagaagcaggcacccacagctaagcagtgagcctaactcctggaatccagtttcagagaaggaggagtgatgagcaaaggggtcaagaccagctggggaaacccacaaaagcagctgacttgaacaagggggatctcatggaccctagactgatagctgggaaaccaacataggaatgaaccaggccccttggacaggggtgtcagtttggaggcctggaagctctatggggcctctgatagtggatcagtatctatccctattgtacaaatggactttgggagtccattccccatagagggatactctctcggcctatacacatgggggagggcctaagccctgtgacaaataatgtgaaaggctctgatgatcccccatgaaagcagaaaggggatgggatgggggtcagtggggggcatgggaggatgggatggagagagacccaggattaatatgtaaaataagattgtttctaatctaaataaaaaataaagcaatagagaaatacactttacaccaacctctggcctccatagactcatacacaaatccaccagcatccatataatacacacagtttagagcagactgacaagtgaagtcagttgactccttacctgacagaatgattgttgcgagaccctgttggtcagatggtacagtctactatggcctggcagctttgtcaaagctcagcaacatgaagtactctctccccaccaaggctgcctcttctctacctgccattatttggaggatgtctctaggcccagatgcctgacttatctcaaggatgacccttgacatcgttccctgcaaatgttcttcccctgatgaccacatgataactaagtaacatgctctaactagttttataagaccatgttgccctaacccagttttatgataggagcatgctgtttaatgtaaattaggtgattccccagctaccattcccaaacctatatattccatatactctgaaacaaagttgatttgtctcactgaagtcatatcccagagggttatcttcattgtatccacagccatcaaaaccctgttccccacttctgctcccttcatctccatggactggtggccaatgagcccaaggaagaaagagatccacaaatgatattgtggttaagattacaatctgtgaaagtagcccttctccattcaaatcctgctcaacttctgatattgatgtgacaatagtttgacttttgttacataacacctacctcttgggctacatttcttcttcaatgaatagagataataatagtttctatttcagacacattaagtgataaaaaaaatgcccagtggctggtccagtacagacactttgtttaaaaagtgacaggaagtcatatgtaactttttcttactgtctctaaagagtttgaactaaggttttaaaagccaaaaatcttatcatggattgtctataaatgataagcaaaaaataatggcctatgagttcaaatagactaagcaacaataagtaggggaaagtaaagatgctataggatgcacaggggaatttaagccaacatttcttcaggcagattatatccaaatatgtggcaagggaaaggatgtttccctgacaaacctcatgagggaaccatcagggaaatatttagcatctgatacatgcttaattctctataaggacgactagcctattgtgtcctgttcttgtacaacctgaatggttagtgactgttctttataataccttttaaatagttttcccagaaacatacattaatttatggtttgtttctatgattagtgaatgttaatctgggtattccattgttgtaacaaatcacacccatataaattcatcgttatgttagccacatatggctttaatttacctctctgtccttctgaccctatatatttgacccatatcatgctctcttttacctgagattatgtttcaatccataaaaactgaacacttacctaaagaggccagtttggatgctaagattctggtgcaattactgatacatctacctgtgcctgtgtccacaagaccttcaatgacaatgtcatttatttgtatttttaattttggttgttgttcatttataaaagtttatcaaaatgcttgcttttcagtttctccttaatttttgttaactcttcgttagctgttctatcatccagagaagtatggtttcttacaacaggcaatagattctttaatttttctgggaaggagtttcctcaacaataacaggaaacaactgaactgaatttggcatggaggcctgcaagaggtccctcaaggcatttccctatgacaaagaattaccttgactgccccttgttgatctacattcatttgtcctatgcatgcccttgccacaccttctgcagaatcgagaagggagaggaataattttagttttacttagaaaaaaaaaacattatttataggaatgccttgttcacaatccctttttagatgacttgtttggcacaattaaaacagttgacactttgatttttttcctttaaacccatggaaattacctctatcaaagcatcaccatggtcatgagattcaatatttattgtatctcatacccattgctccaagagttctgatcttgccttcaatagcctcattaccattttgcattgtttataggcattttcaaaagacagagattcaattataatttgtttatcttctgaaattcacttggcaggtgttcctgtaaggtaactgagtaaattaaagttggttgtttgaaaaccttaggctattcctctctaaccttataatacagtgctgatgttggttctcctttaaattcctgtgtctgggtttgaatatctctataatctgttttattaggtattccaaaatcttgtatcttagcactcatattaacaaacttttaataataaaactgatgtttataattgacattacataaagcccatctaaattagctatcttctcatttaattgatccattttcaaactgtccagcgtattatcatacagatatctaaccccctccattgtaatgtggaaaatctctctctctctctctctctctctctctctctctctctctctctctctctctgagtgtgtgtgtgtgtgtgtgtgtgtgtgtgtgtgtcctaattttcccctttaagaattcccaattgtcttaccaaatctactgatgatgacagcagaacataaggctgcaaagcatgcctgatcagagaatacagatgccacacagactagctgaggacagctacagctgctagtgtgtagctgtgagctgagagtgtgtggcagttgcacaaacagtagaagcctgagtgggtatcaatgcagatacttagtagcagcagcctgaggagggagttcaggagaagtccacaacccacaggggagagggaggaagtggttttaaaaactcacaagggatcatgcagaagaagcatggctgctgcagagggactgcaacaaaaaaagttccaaactcatttagaggcttaaggaaaaaagagaggtgaacctagcctgctaagtggtgaccccaggaggagttctacatgcagctctggtctgttccagtggttgcaaagccacaggcaagtggctttttcatgaatttgtaccccaaaagttgggtgccagatgtaacaagagttctaattagtcttagtaataacaaacctggagtcagatactgggataaatgctgaaagatcagagagacaaaagaacaagacacagccacctcttacctagccaacttctcagccaaaaagagactgagttcctgtatccttcagctttatattcctcactccacccaggcatatcactacctgtctgtctgtacagacctccagacctctgtggttagctagtgtatagctctgccctctgatcttcaggaaagctttatttgttagagtacaaataagatatcaccaaagtgaagagcctgatttcctctctgcacttgcttacctgggaagagcctactgcacccctctgtctctcttttctctctcttactgagcactctgttacaaagacttctctccaaagtcttaatcccaaaagtcactgaaatggaatgcaaataattgttgcagttagttttaactgtcaatttgacacaacctagaaatatgtgggaagggagtcttcatgaaatttagagcaacttggcttgtgggcatgtctgggtgatagtggtggtcctgactggtaattgattaggaaaacacagccaatatgtaggtggtaccttctggtagcctctcagaaacaggaatgcttacctgttttcctcacctggatttcatgcttgctggtcaatccttccactgtattgcttctgctgcaattccttctcttacacgagaaccgtattcttcaggattccaacatggactaaaggccagtgaccctcaaagaatcccccatgccttcagtgccagattgggactgctaagaactcaagtctcttggactgagcaattgtgggtgagatctcagtctcttgactgtgagacagtcattactgaaagactctggtcatttcctgtaagccagtttacatactctctttaatgtatattcactctcagctctgttccactggagaactctgacaaagagagaagagaccttacatcgaagctagtggcaaacactacagaatgtgaaaaataaaactagaagctacataacttgcaagagggtggtttgaaatccctacttactgtacagatacacaagcataaaaggtgacaatttcaatgaacattgttctcaaatacaaggtcctgtgctaactacttctccaaaagctttggtttctaactcacaattatggcccttacagaaggaagtttcagacctcaagatcacctttagactggagctcagatccaaagtgtataggtttaaaaatttagagggcagctaagacaaacagggagaaaagataaattttccagaactctcctttgtctttagggtattttaatcaaatgagaaagccacagacggtcacactatttctttgtacataaatagcaatgtagctaggtcatatcttccacattccatctgccagatgcaaggtgggggagcagagcagttaagcatgtcattaatcatggctgagagtggcaggatcaagcacactatgattcatgataaatagagaagcatctagataatgtgctttgtttctttcccttaagtgaaaacaagatgaagaatctaaagtgatgtttgtagacctgtgctagtgtctgaggtagaatgggtgaccatttgattgaagaaatcatctaatttatcagaataattgcctttacacaccctgtgggggtggggggagaggaagggaggaaaagatatataactatttgctttgttttctttctgtggtatttccatctacactgtcacccctatcatgctcagaatgaaacatcttagcttaaattaaacgctgaaaggaaaatacttgagaaaaatgctgtttggggaggggttgttattgttgttttatttttcttactaccagattattaagactagactgacaggaagatggttctcctttgtgtcttactattgctgctttgtgcttttaaaacagctattccttggctcacaccaccatgtgactagtgagtaaaggacagattagatcccaattttcctgtcttaagtcaagcatggaagctgcttcctttatgtgattcaagggagtgtgagtagtattacactattttaaaatctgtccaattaaaggagactatctactcttattgtacagattcacaaaacatactacatatgtgtgtgtgtgatgtgtatgtgcagacacacatgcccatgaatacccctgtggatggtagagtaggatataggtatcttcctctatgacagggtatctcactgatacatgtttaggttaggctggattgacagagagcttctaggatccaactatctctgcctgtacctcatgccctgaccatgatgtgcttttatgtgaatactggagaattgaacttagttcctcttccttccatggcaactactcttccccactgagccatctccttggcacagtagtattatgaaacaaaaccaatgaaattggtttaattacttcacaatggctaccattaagaatacaaagagatacagacttagaaccacaaggggacaagaacatgggaagcaggtttcagaagctaatcacaaatactgtgaaatgctccccaaagtcatggattccttacacatatactatacttctctttttattcatgagttcagccacctggactacctttcagctcctgcaagcttccaaccccaaatccttttagacttcatgcatgttgttctttttttcttatttttttattagttctagttagggaacaagcttgtttcaagtcccctctccctctccctcccctcacccccaaacttcctctcccacccccagtccaccccccacnnnnnnnnnnnnnnnnnnnnnnnnnnnnnnnnnnnnnnnnnnnnnnnnnnnnnnnnnnnnnnnnnnnnnnnnnnnnnnnnnnnnnnnnnnnnnnnnnnnnnnnnnnnnnnnnnnnnnnnnnnnnnnnnnnnnnnnnnnnnnnnnnnnnnnnnnnnnnnnnnnnnnnnnnnnnnnnnnnnnnnnnnnnnnnnnnnnnnnnnnnnnnnnnnnnnnnnnnnnnnnnnnnnnnnnnnnnnnnnnnnccattcctggggaccatttatcccttagagtccttcatgtttcctagtttctttggtgaagggcattatagactggtaatgctttgctctatgtctaaaattcatatgtcagtgagtacatagcatgtttgtctttttgtgactgggttacctcactcaggatggtttcctctagttctatccatttgcctgcgaatttcaagattccattgcttttttctgctgagtagtactccattgtatagatgtaccacattttctctttccattcttcagttgaggggcatctaggttgcttccaggttctggctattacaaacaatgctgctatgaacatggttgaacatatgtccttgttgtatgtacatgcactatttgggtatatacccaagagaggaatggctggatcttgaggtagactgattcccatttttctgagcaaccgccatactgatttccagagtggtcttacaagttcgcactcccaccacttatggaggagtgttcctttttctccacatcctctccagcatagattgtcattggtattttttattttagccattctgacaggtgtgagttggtatctcagagttgttttgagttgcatttctctgatggccaatgattttgaccactttcttaagtgtctttcagccatttcggattcctctgttgagaattccctatttagttctgcaccccactttttaatttcattgtttggtgttttggtggctagcttcttgagcgtcttatatattttggaaatcagtcctctgtcagatgtgggatcggtgaagatcttttcccattctgtgggtggtcgtgttgtcctactgcatgttgttctttactccaaaatgatatcaaacatcctcgttcatctcttcacttagccaattcccgagattctctaagacttaaagatttctcttcaaagaagccttttttactcccataaattaagattaattttgtttttcagtctcctaattccttctgcatctcctttagattgtttatagaaactacaatcaaagtgtaggtaaatttataattgtgtttcacagaattaaattatagtaaaacaaacacaattgcttttggtttattttggataacacatcctccagcacatagaaatgtccatcaggaaagggtgattttcctccttattaaacccagaggtggcccaaatgccagagacatggaatatgtggagggtgggttaaacaccaacttcaaactttcattcaagtttgctttttgatttcctaaaattttcaaggaaaataaatggaaaagtgaagctcaattgtaagggcaaaaattaatctgtgagccccacttgtccaaggacagagaacttcctgggaagctgcaaactattgttcatgtaagataaagtcatgtgttttcacttcagtaaacaagcttggttgcccaaactgagcagaatgtgcttaatcacatgtatgcaggagatacatagtcaggaagtacatcttgatgtatgtttgccccctgtaggataaaggttggaagtagaacagccttgttgaggtttgcatttatgagcacctacctgactggctgaattcattgacagttctctgggaatcctgggtgtggattcctggctcatgttaaataaaacttgcttcagttggacagtcctggattcagtcttttctcctcacaattttcaggattaacataatcacaaaatttctgaagaaaaaaaaaagcaaaagtcttctcagaaaatagccatcaggttagacagaaatccaggattctagtacagagacagcagccttacacagggcagcttcctctgcatcattttcacccccaggctctgcctgtgagatgagtattcaatgacaaaattttacatagatgtagggactgtgtgggggagctaaactgtgcttaggcactggtgaccaacatcacaaacacagaagcagacagaatgcctctgccctggcaaaaccaactgttaattcacagctgatggtagacaagttaattctgaagccaaattctgaagccttggcccaagaacacaaattcagtttacagaaatactatgttccaatgtggtaagagtttaattgagtttttaaagcagcagaaaaactaaaatcataatttcagataatttttatagacataggtggaaaggtcaggctgccagattacagaaaggcagaaaaatctcatctatggtctcagagatttcacgaccacagagttagctattggttcctgggttctggctgcctgtctgtacatcccaatgacttacctggtagtcaaaatgatgacatcatgccacagataagagtgagcaatgcatggctagtaatgggactaaaatatggcctaagataacccagctcaggacctgcaatattccaacctctccacatcattgaagttctaatccatcaataatgttcacgtgagcttaatactctgggtatgttatttggctttcctgtatttcaattgtatcatcagtaaaatgggtataaaagtgtcagctaagtgttctatgtttagctgtatgcctgtgaatttgtgtatgcatttcagtcttattggtgttatttattttatgaaactctaacaggaagtatcagggaaaagtaatcagagaaactaaataaaagatgaattagggagaaaaagaattctaaagatagaaggggtcataactgagtagcctatgaatagatttttaaatacatttttattatttatttgtttgtatatatgtgcatgacagaaagggtattaaatacctggagctggaattacaggcagctatgaaccaaaatgcatgctagctatgaattgaactgcagtgcttgggtagagcattaagtgcccttgcccagagagacatcttaacacatatgaagacattatagtctagtaaaaacaatccttaaacatcaaaaggccaaggaaggggaggagggtgcatgtgaaggaaggggtcattgtttcagtgtgtgccatagaatgaaggcagcggtgagcagtgggtgctgagggccttcgggctgatgccaaagactctgattttcaagctaaattaggagctatagtggcttcctgggcagagcacaatcttattaaaataatttaggaaagggtaatcatcgttttaactggggtggattagaaacaataataacctgcctggctaaggtttgagtctgcctcaggattaaaaagaaagctggaaattaaggggtatttagataacagatggggaacataggtgtaaacagaattgctccaggattcccagggcatagcagcagagaaggcctagccctagaggaagacacaaggtatattgtcacaatacttcagagtacaaaggcacacatcattaatagttaatgcatttcacagttcaattctggtattttattggagaagaaaaccctcaggccaagataagttcataacaggacattcacgtctctccacacccttgagggttttttccccaaacattggtccactaacctgcaaaaagaagccacaaatcaggcctactagacatggctactcctttgaaggttttaccagtatgagctcagctgactcacccaattcatttcacacaactaccaaataccagtcaatcttctgtcatttgaaaaccaagaacttaaaagttaaaagaaccctatcatgagactggcaccttaatctcactcacatctggttctcagactgacattatcaagaaattaatgattctccactcactgatatgtttgtgtctgcaaacactgcatttgaaatcatccctggtcttcattggttatttttcaattatttagtgacctatatccataaaaatactgcactcattttgaatatgtcatctatataatgggtataaatctatcttctgaatgataaattttatctgaatacctctaagactagaaggtcaacagaatcttgccttgagtgccaggacttgcacaacctgattcaggttcctgtcttttcatctattacttgttgctactaagtaaaaataactattgtgctgggcattggtggctcacacctttaatcccagcactcgggaggcagaggcaggtggatctctgtgagttcgagaccagcctggtatacaagagctagttccagaacagcctccaaagccacagagaaccctgtctcgaaaaaccaaaaaataaataaataaataaataaataaataaataaataaataaatattgtttttctcaactgaaaaaaatgggattaagatggctaaggaaactactttggagtgtcaaatgtcagacagaatctgcctttggagctttgggcattttcacctcactacctcttccctgctcttctcattcagtctacttccaacttgaccacgcagtctcagtgacagatgagtagtagaggccatcagccaatacccattcagaatccacatgattaaagcagcagcaaacagtcaatgaggcagagatgggccatcttcttcacctagacagattgcaaattgtcctttctatggatcgtatggcatcttcactgtttgacagtcccagtgtttacataacacagagataaaaacaacacagccaatcatcctaaagcttacaacttaatagtatcagaaatgtctaaatagtaaatcttgaatgaatgaaggtgaaatgactatttgggagatcaaaaatgttttctaatgccttaatggaagtttagcatttgataaagcaagaagaaaggtaaaggtattttcaataggtgggttaaacagtagaaacagcaaccttagagggacagagaaatccattggggtgtgtgtgtgtgtgtgtgtgtgtgtgtgtgtgtgtgtgtgtgtgtggtgtgtgtgtgtgtgtgtgtgtgtgtgtgtgtgtgtgtgtgtgagagagagagagagagagagagagagagagagagagcatgaatgtacatgcacacatgttgtcatctggaaataactaatttaaagcattttactttactttttcatcattttactttccttcaggaaggcactgtcttttgtagataatacaaaacaggataagtcgtacaagacactgacacaaggactatattaatatcttcactatcattgctatcattagcaaaactagcagtcatatgtcaagtgctggtgaaaccccaggtacgttggcaggcacttggtttgcattacccatccatctcttaaatgggaaatcttttgacaataatggcagttatgcctcagagagtttaaccctgagtcagatgcccacttaaggcaagaggaacaatgtctacatttgtctgtctttataaatcttttccactaccctgtgttcaggctgaagaaggatgggtagaagcgggtaagtttgagctcagagacatcgtaattcactgatgagaagaggcatggtcaattttcccacatctccataacaattatgaaggaaacatctaactccccttactgcagctccatgctcatttctgggatttcctgcatgttgcagaacatgcagtccttggagaaagaggatcaatattaagacttttaatattttgctgcctgttagcatctaaagagctcaaactaatgaactcatatcacactgcttttattaaccacatcatttctgcatctgcaagaagacataagccaggagacagctggaagtgaggtgaagtcaatgatactgatgccactgactttgcaacccaagggaagcaaactgtggcttgtttggctgattactcacaggaaaaacctccaggctgaaaatgaaagcaggatcatcaccggcacaactcctaaagaatgtctgtattttctgtaagatgaccgtgtggctcacagctctttgtccgtgaaactatatattaacatgtttaagaaaatgagagggggcttagccatggagactctggtggtgttcagaaggaaatgaccacatcccagctacttattactgtgcagatcttgagaaattaatttgtttttctgatttaaacaccactggccttagctcataaacattaaatgaagggacagaagttaattttccaaaggtctcttcagttccaatcttgttacagctattgtgctagaaattgcttttgtagaaaaatgagtaacaaatccaatggtccatttattcaaactatgagaaatctaaaatacctgcaagacaagacatgtatcatgaattaatgttttggaatgtacaagataaaacaaggaataattgggccccttcagatactcaccactgtgtttttaagagacatttatttatttatttatttagcctccaatgttctttacatccactatgttcataatttcttttctgaagaaaaaatgactgataacatttatttgttcatttatccaaaacaaagactaaacagatgtcagtcacacagcttaatgcctgaggaaactgtttacacccccaccccaaaagaatacagggtatgttagaatcactgtccggaatctgagaaaattccctcaattagaaatgccgagacttcaccggggaaaactgctgtgaaaaagaaattcataacatgtcattttcacagcttaatccctgaggaaactttttatatccccactcccaaagagtggcagggtgtgttagcatctgtcaagagaaccctggccaaatgagtcagcttaatgctgtcactccttagcaacaattgataggatgaaaggatagatcagggaagctgcactccgtgggtaatgggaaggaagtgatagctgcagaacccttatcctggagcttttaaccaagcagataccacagttgtggctgtgatgactgaggttgactagtgagaacaattgtagtaagttctcagaatagcagaaatggagtgacaggacttacccaccaggaacaagatgagcatgtgtgccataagggttgccataccagtaaccaaaatgattgattgatcatcaggaatcacatcaattactaatttctctcaatatccccaggacttcaacagatgggaaacctataaagacacccattataccacgtaacaagaaaaaaaaaaaaacatcgtatatatttattccattgtatatctgtagcctctttgtcaaaaatcaggtgtccgtagttatgtgggttaatatcagggttttcaattcaattccattggtctacctgcctatttttgtgccaataccaagctgttttcaggattatatctctataatagagcttgaagtcagggatggtgatgcctccagaagttcctttattgtacagggttgttgtggctatcctgagtcttttgtttttccatataaagttgagaattgttcttttaaggtctgtgaagaattgtgctggggttttgatggggattacattgaatctgtagattgctttgggcaagactgccattttcactatgttgatcctacctatccaaaagcatggaagacctttccattttctagtatcttctttaatttctttctttaaagacttagagttcttgctatacaggtctttcacttgtttggttagtgttaccccaagatattttatgttgtttgtggctattttaaagggtgatgtttctatgatttctttctcagccctcttatcatctgtatatagtagggcttctgacttttttgagttaattttgtatcctgctactttgctgaaggtgtttatcagctgtaggagttccctggttgttttttcaggtcacttatgcaatctatcatatcatctgcaaacagtgaaagattgacttcttcctttccaatttgtatccttttgttgtcttattgctctagctagaacttcaagtacaatattgaagagatatggagagagtggacagccttgtcttgttcctgaggaggactctaagagagacatacatggtcccccagagaaggggaaaggtacaagatctcctgagcaaattaggagcatgggggagggaagagggagctaggagaatgagaagggcagaagagggggaatgaggaggacataaaggagcaggaaggttgtgtagagggaagaatagagaagaacaaaataagaggtaccatcagagatggagccagtataggtttaaagagaaatcaggcactcggaaaatgtccagagatctagaaggatgacaccaactaaccatctaagcaacagtggagaggctaccttaaataacctcccctgataatgagattgatgactaacttatatgccatcctagagccttcacccagcagctgaaggaagttgaggcagataccaacagctaaacactgaactgaactgggttccagttgcagagaaggagaaatgatgagcaaagtgnnnnnnnnnnnnnnnnnnnnnnnnnnnnnnnnnnnnnnnnnnnnnnnnnnnnnnnnnnnnnnnnnnnnnnnnnnnnnnnnnnnnnnnnnnnnnnnnnnnnnnnnnnnnnnnnnnnnnnnnnnnnnnnnnnnnnnnnnnnnnnnnnnnnnnnnnnnnnnnnnnnnnnnnnnnnnnnnnnnnnnnnnnnnnnnnnnnnnnnnnnnnnnnnnnnnnnnnnnnnnnnnnnnnnnnnnnnnnnnnnnnnnnnnnnnnnnnnnnnnnnnnnnnnnnnnnnnnnnnnnnnnnnnnnnnnnnnnnnnnnnnnnnnnnnnnnnnnnnnnnnnnnnnnnnnnnnnnnnnnnnnnnnnnnnnnnnnnnnnnnnnnnnnnnnnnnnnnnnnnnnnnnnnnnnnnnnnnnnnnnnnnnnnnnnnnnnnnnnnnnnnnnnnnnnnnnnnnnnnnnnnnnnnnnnnnnnnnnnnnnnnnnnnnnnnnnnnnnnnnnnnnnnnnnnnnnnnnnnnnnnnnnnnnnnnnnnnnnnnnnnnnnnnnnnnnnnnnnnnnnnnnnnnnnnnnnnnnnnnnnnnnnnnnnnnnnnnnnnnnnnnnnnnnnnnnnnnnnnnnnnnnnnnnnnnnnnnnnnnnnnnnnnnnnnnnnnnnnnnnnnnnnnnnnnnnnnnnnnnnnnnnnnnnnnnnnnnnnnnnnnnnnnnnnnnnnnnnnnnnnnnnnnnnnnnnnnnnnnnnnnnnnnnnnnnnnnnnnnnnnnnnnnnnnnnnnnnnnnnnnnnnnnnnnnnnnnnnnnnnnnnnnnnnnnnnnnnnnnnnnnnnnnnnnnnnnnnnnnnnnnnnnnnnnnnnnnnnnnnnnnnnnnnnnnnnnnnnnnnnnnnnnnnnnnnnnnnnnnnnnnnnnnnnnnnnnnnnnnnnnnnnnnnnnnnnnnnnnnnnnnnnnnnnnnnnnnnnnnnnnnnnnnnnnnnnnnnnnnnnnnnnnnnnnnnnnnnnnnnnnnnnnnnnnnnnnnnnnnnnnnnnnnnnnnnnnnnnnnnnnnnnnnnnnnnnnnnnnnnnnnnnnnnnnnnnnnnnnnnnnnnnnnnnnnnnnnnnnnnnnnnnnnnnnnnnnnnnnnnnnnnnnnnnnnnnnnnnnnnnnnnnnnnnnnnnnnnnnnnnnnnnnnnnnnnnnnnnnnnnnnnnnnnnnnnnnnnnnnnnnnnnnnnnnnnnnnnnnnnnnnnnnnnnnnnnnnnnnnnnnnnnnnnnnnnnnnnnnnnnnnnnnnnnnnnnnnnnnnnnnnnnnnnnnnnnnnnnnnnnnnnnnnnnnnnnnnnnnnnnnnnnnnnnnnnnnnnnnnnnnnnnnnnnnnnnnnnnnnnnnnnnnnnnnnnnnnnnnnnnnnnnnnnnnnnnnnnnnnnnnnnnnnnnnnnnnnnnnnnnnnnnnnnnnnnnnnnnnnnnnnnnnnnnnnnnnnnnnnnnnnnnnnnnnnnnnnnnnnnnnnnnnnnnnnnnnnnnnnnnnnnnnnnnnnnnnnnnnnnnnnnnnnnnnnnnnnnnnnnnnnnnnnnnnnnnnnnnnnnnnnnnnnnnnnnnnnnnnnnnnnnnnnnnnnnnnnnnnnnnnnnnnnnnnnnnnnnnnnnnnnnnnnnnnnnnnnnnnnnnnnnnnnnnnnnnnnnnnnnnnnnnnnnnnnnnnnnnnnnnnnnnnnnnnnnnnnnnnnnnnnnnnnnnnnnnnnnnnnnnnnnnnnnnnnnnnnnnnnnnnnnnnnnnnnnnnnnnnnnnnnnnnnnnnnnnnnnnnnnnnnnnnnnnnnnnnnnnnnnnnnnnnnnnnnnnnnnnnnnnnnnnnnnnnnnnnnnnnnnnnnnnnnnnnnnnnnnnnnnnnnnnnnnnnnnnnnnnnnnnnnnnnnnnnnnnnnnnnnnnnnnnnnnnnnnnnnnnnnnnnnnnnnnnnnnnnnnnnnnnnnnnnnnnnnnnnnnnnnnnnnnnnnnnnnnnnnnnnnnnnnnnnnnnnnnnnnnnnnnnnnnnnnnnnnnnnnnnnnnnnnnnnnnnnnnnnnnnnnnnnnnnnnnnnnnnnnnnnnnnnnnnnnnnnnnnnnnnnnnnnnnnnnnnnnnnnnnnnnnnnnnnnnnnnnnnnnnnnnnnnnnnnnnnnnnnnnnnnnnnnnnnnnnnnnnnnnnnnnnnnnnnnnnnnnnnnnnnnnnnnnnnnnnnnnnnnnnnnnnnnnnnnnnnnnnnnnnnnnnnnnnnnnnnnnnnnnnnnnnnnnnnnnnnnnnnnnnnnnnnnnnnnnnnnnnnnnnnnnnnnnnnnnnnnnnnnnnnnnnnnnnnnnnnnnnnnnnnnnnnnnnnnnnnnnnnnnnnnnnnnnnnnnnnnnnnnnnnnnnnnnnnnnnnnnnnnnnnnnnnnnnnnnnnnnnnnnnnnnnnnnnnnnnnnnnnnnnnnnnnnnnnnnnnnnnnnnnnnnnnnnnnnnnnnnnnnnnnnnnnnnnnnnnnnnnnnnnnnnnnnnnnnnnnnnnnnnnnnnnnnnnnnnnnnnnnnnnnnnnnnnnnnnnnnnnnnnnnnnnnnnnnnnnnnnnnnnnnnnnnnnnnnnnnnnnnnnnnnnnnnnnnnnnnnnnnnnnnnnnnnnnnnnnnnnnnnnnnnnnnnnnnnnnnnnnnnnnnnnnnnnnnnnnnnnnnnnnnnnnnnnnnnnnnnnnnnnnnnnnnnnnnnnnnnnnnnnnnnnnnnnnnnnnnnnnnnnnnnnnnnnnnnnnnnnnnnnnnnnnnnnnnnnnnnnnnnnnnnnnnnnnnnnnnnnnnnnnnnnnnnnnnnnnnnnnnnnnnnnnnnnnnnnnnnnnnnnnnnnnnnnnnnnnnnnnnnnnnnnnnnnnnnnnnnnnnnnnnnnnnnnnnnnnnnnnnnnnnnnnnnnnnnnnnnnnnnnnnnnnnnnnnnnnnnnnnnnnnnnnnnnnnnnnnnnnnnnnnnnnnnnnnnnnnnnnnnnnnnnnnnnnnnnnnnnnnnnnnnnnnnnnnnnnnnnnnnnnnnnnnnnnnnnnnnnnnnnnnnnnnnnnnnnnnnnnnnnnnnnnnnnnnnnnnnnnnnnnnnnnnnnnnnnnnnnnnnnnnnnnnnnnnnnnnnnnnnnnnnnnnnnnnnnnnnnnnnnnnnnnnnnnnnnnnnnnnnnnnnnnnnnnnnnnnnnnnnnnnnnnnnnnnnnnnnnnnnnnnnnnnnnnnnnnnnnnnnnnnnnnnnnnnnnnnnnnnnnnnnnnnnnnnnnnnnnnnnnnnnnnnnnnnnnnnnnnnnnnnnnnnnnnnnnnnnnnnnnnnnnnnnnnnnnnnnnnnnnnnnnnnnnnnnnnnnnnnnnnnnnnnnnnnnnnnnnnnnnnnnnnnnnnnnnnnnnnnnnnnnnnnnnnnnnnnnnnnnnnnnnnnnnnnnnnnnnnnnnnnnnnnnnnnnnnnnnnnnnnnnnnnnnnnnnnnnnnnnnnnnnnnnnnnnnnnnnnnnnnnnnnnnnnnnnnnnnnnnnnnnnnnnnnnnnnnnnnnnnnnnnnnnnnnnnnnnnnnnnnnnnnnnnnnnnnnnnnnnnnnnnnnnnnnnnnnnnnnnnnnnnnnnnnnnnnnnnnnnnnnnnnnnnnnnnnnnnnnnnnnnnnnnnnnnnnnnnnnnnnnnnnnnnnnnnnnnnnnnnnnnnnnnnnnnnnnattccattggtctacctgcctatttttgtgccaataccaagctgttttcaggattatatctctataatagagcttgaagtcagggatggtgatgcctccagaagttcctttattgtacagggttgttttggctatcctgaggcttttgtttttccatataaagttgagaattgttcttttaaggtctgtgaagaattgtgctggggttttgatggggattacattgaatctgtagattgctttgggcaagactgccattttcactatgttgatcctacctatccaaaagcatggaagacctttccattttctagtatcttctttaatttctttctttaaagacttagagttcttgctatacaggtctttcacttgtttggttagtgttaccccaagatattttatgttgtttgtggctattttaaagggtgatgtttctatgatttctttctcagccctcttatcatctgtatatagtagggcttctgacttttttgagttaattttgtatcctgctactttgctgaaggtgtttatcagctgtaggagttccctggttgttttttcaggtcacttatgcaatctatcatatcatctgcaaacagtgaaagattgacttcttcctttccaatttgtatccttttgttgtcttattgctctagctagaacttcaagtacaatattgaagagatatggagagagtggacagccttgtcttgttcctgaggaggactctaagagagacatacatggtcccccagagaaggggaaaggtacaagatctcctgagcaaattaggagcatgggggagggaagagggagctaggagaatgagaagggcagaagagggggaatgaggaggacataaaggagcaggaaggttgtgtagagggaagaatagagaagaacaaaataagaggtaccatcagagatggagccagtataggtttaaagagaaatcaggcactcggaaaatgtccagagatctagaaggatgacaccaactaaccatctaagcaacagtggagaggctaccttaaataacctcccctgataatgagattgatgactaacttatatgccatcctagagccttcacccagcagctgaaggaagttgaggcagataccaacagctaaacactgaactgaactgggttccagttgcagagaaggagaaatgatgagcaaagtggtcaagaccaggctggtgagacctacagaaacagctgacctgaagaaggggaagctcttggccccaagactgatgactgggaaaccagcatagactaatccagaccccatgaatgtgggtgtcagtgaggaggcctcagaagtctatgggggcctcttgtagtagatcagtacttatcccaacataggaatagactttgggagcccattctacatagagggatactccttcagcctagaaacacgagggagggcctaggccctatcccaaaggatatgacagactctgaagacccccccatggaagacctcactctccctggggagcagaaattgtatgggataaatagggtgttagtgggggcaggggcaggggagggagagagaatgggtattgacatgtaaaataatcttgtttctgatttaaataaacaatgggggggtaaaggaaagatacctaagtctggtgatcaaaacataacttaagccatcacactgtcaaggcatgatgtgccaactgctttttatatacccaatgcaacccagagagcacagattaattaaaattaattgatgtatgtttgccactagtgtatgattatattccttggagcccttgccaaagtatacagtagctgagttactagaatgaatatgaagcaaaaattaagataagaacctgtatttcttgggcatcattagatttactgaactgccattaatgtctggaggtccaaaatgccaatcaaaagtttggatggtatggaaggagtttttacatacatgacaataagttcagtaaatgcatagatctagtgtgtgtgtgtgtgtgtgtgtgtgtgtgtgtgtgagagagagagagagagagagagagagagagagagagagagagggagggagggagggagggagggagttcccaacagtttctgactgcataattaagggagacatttttttaaaaagtagaatgctaatttggttttttggcctatagatacatgtacacagtaagaagagtaactgtaccatcttcaatttgcctatctaccagaatgatggatcaaaagtaatgacagactattgagtgggtgtcagaggtcactgttgataacaaagcattgtaagaaacctgtcacataccatctgaaatcacagtcattaagaaatgggataactgtggacaggaactgtcacaaacttgaccagatggtaaaattaacagtagctgttgctgcagagatgggatcactgagcaaagtggcatagcactgtcacactgtatgttcacaattttcttcaaaaatataagtcttcaaaaatgagccttaattttattttatctgggcaaggcagaaagattccttcttattcaaatgtcttattagaaatgagacagttttcccaccttctgccataatcacacaaacactgcccactttgtcattccacagggaattacattgaacaattatcatgaagattatagctgataaacaaaaatattttagatacttaatgaaatgtacaaaactaaagtcccacaaaactgttaatatagtaggaaaaatcaaatggatgaatttaacaacacagactcactcaaacatgactgcgattgacagcaataaatgaaacaagttcagacagtatatgcaaaggtctcattgaagaggtggctgacacacatctatcaatgacagtttagttggatgcccaccaatttgaaaagtagtgtttagagactagtgacaagaagtcagtgatagacttatgtgtatgagttttctgcaataggcatgcacacaaaacctattttggttgcatgttaagcttcactaaggaaggtttctggcagtccagtgacacagtccagtgggcaaatatacctatatcaaacacacagtattcccagcctcctctttatgaggccagtaagcacaaagttagaagctatccactagttcagtctagcttagctattgctattctgagtgtcctctgacagttttccagtgtgggacacaatggggcagcaggctgagtgattacacaagatcaccagcaagccaactggtagcaggctcattacccaggccctgatccattttgtagggtcagagattcaatgaacataaacaggcacatatatcctgggtatggattatgctctctggacaacaatcacaaagctactgttgcctgtgctatttcacttgatatcatggtgatcactcactgtgatagtttaccaaacagaattccctctaatcaaataaacttctaaaatcaaaagacatacacagatgagctcatctccatggagtcactattgttttctatttacttgatatgtgtgtgtgtgtgtgtgtgtgtgtgtgtgtgtgtgtgtgtgtgtgtgtgtgtagaacctttccccatttctgttactccattatgcatgcactgttggagataacctttaaaatttagtttgtaagaccaatagagatgcccttagcagtcgttagctggactgaatcttcaacagtcatcttactaactctgggcatccatctccttctcagaacaaggactttaggaaacttgtaattgtaaatcctttcttttcccctttgacacataaatctttttaaaagcttcttgtaggttttacaactcagaaaagtgtttcccaaggccctgggtgcaatccctttgaaatgtaatcatgcaagcagatagaactttgtgtcctggtttccatgggannnnnnnnnnnnnnnnnnnnnnnnnnnnnnnnnnnnnnnnagagcctagatcctttaaccccacttgaaatattgcagtagattcctaatagtttttcctcacctctctttaaaattcagcctctcattttctactgtaaagttctcaatagcactatgttgtgaccacattctttttcctctctctaaatagaaaatgctgcaaacaaagggcatctacttatgcaccaatgctctctatttcaggcagggtcaaaaagacacccttgctgaagtgtagtttactggcattggcgcaggctcagtagttgtaactgtagtaaggtctcctgtagcagaacttatggcttccatagcagccagggttgaaaagtttcttgaatttggacttgttttccacaaggctttggtgaagtgttcacggtagtagagatgccaactttgcagacaggatgttcaattttaaaaagttgctgcttggttgaaaacttctgacttgttagctagactcaagtgtctgacagctatcaagcaaacaaacaacaacaaaaaatattcctggtccttgtgaactgaagtttctaggaagaaaaagcaatgagaagtagtgaaataaagagaaaaaggctatgcctgtgtgttgaatagtctacaaagacaaatgactgaatttcagaattaaaaaattacaggtcagaaccaaaccaaattttctagaggcatttttagtctctccacaagccatttatttgccatatctgcatctgacctaacatctttgtgagtaacaaaaccttacaatagattgtcagaagatcactagctttttcatcaatccaaaagctaagccaatagcagagtgctccacccaccttgccccaccccctactccccagcactttgctgccacttccctagcttgtgtctccacaatgtttctggaaaatattttaattcttgactttcactgttctatctaatgacaacctcaatgtacaaattccattggagcatggtatttgaggacaatcgaatctgttttcctgggcctttatcattcatatttggcttgaggataaaatatttcctacttcctgacaactgtttttgcatccatgcccacaatatgtaccttaagtggaagcaaggcaaacactgcagaatgcttactctaaggacgtatcatcacattaacattcttgacaatatttaacaacacataattccgaaaataccctcaaggactctggtccctttctgtctccttcccattccttacacttctctcctccttttataacccaaaatgcattatcttctcagacccaggcatacttgtcatcacaggtacagagctgtgtcaagggaaactcaaagaatactgacatatttgagaaggtaaatgaatcaaggagtctttaactaaccattatattagcaaggagatacataaagaagtagaatccaaactttgtgttacattttaaaaatgattaaaaggtgcagtatatgaatagtctttgtggttcgcagtactttagtaggaaaattcaagttacacaggtggctagaataaagcacaaccttaaatctatcacatatgtggccctgtgtcttatcgcctaccaatagataaaccctgtcacccagggcactgcccttttaaacctaccttttaaacacttggaatgcattgctttggtttctgcagacaacagataatgtagtttacacacactgtttccctaacctggagagcaacttctccacatggagtaagtaactggacatggaagtcacgagaaaaactatgtgctaaatgtgtgactaaacatttgggaagctgtagaaggttgtctttgtgagtattctgggatgtccaaggagccctggatgtaaatcagaagaccatgatggcccacccaatggtattcttcattcatttcagctttgttgggtttaagatgactttttaatgagcccctgtttggcacagaagccaaggaaacacacacacacacacacacacacacacacacacacacacacacacgccagaactctaatttagtaccaggtctgttgaaatccatggtgtgtttggttgtgagaaaagaatttcccaggctgtctttgggatacagtgcttttcttctgagcagagaatcacaggccattatgagggcaccagaggccccaggcagaggtgggaaaaccaacacactcctgtgatagaatgactttttccatcatagttttgattgccaagagccagttgggatgaatttttatgaaaaattgagtttacagctaaaaggcagaattgagctcaggcatctttgctgcctgcctatgtaattcagatctattttcccagcttttttctgttattgtcccatgaagaagccttctcagacatctccaaactcccttccatgaaatttcaataatgacaaacattatgtgtatgtttatataatttctataataagaataagcgggaaacttacttggctgggttgaagagctataggaaaccttggctgctgagacctggaattggtgttctacaggaatcactgtgttccatgatgggtcatccaatatcaagctgggagttctaagcatatgtacatgtgactaggtaatattttaagttaaaacttagcttaaaagtctgaaagcatgtaattaatatcttttgcctggcactttctactagaagccacatagaaaactgagataaaaaggagaaaagttgctggactcaagacctgtagtagcaagcttctaaacctaggtcttctaagaaacagaggaaacagcatttgacagtaaaatagtgcataaaatgtggaaccatgcatgtttctaattgctaatataaaactacttgtcatgataaaaaaaagaaaaagtagtattgagaagatcacaagcatgactgagggctggagaactggcttggctggtaagagagcttgctgagaaatcagagggctggggctcttatcccagcacccaggaacaagcagacatcctgcaatggcctgtaactccagctccatggattcaacaatctcttcaagtcccatgtgtacataagctggtaaacacattcacccagacttataaatgtaaataaataaataaaaattcatttttataaaaagcatttctgaagccctaagcatacctattctcccagaagtctatctttgctaaaagtaaaaagatgactactacattgttttgtttttgttttttttttatagcaactgactttttattcttctagcaattatggtaactttatatctctaagatttaaaatgaaagccctacatctttgcagtcatttattttatgtgggctacactcttatgatctataaaaaaaaaactttgcttttatactgttgtattttatttgtcaaggacatcaggcttatttgtaatcaagaagtttctgtgaataacttatttgttgtgcacactttattacattatttctttattgttggcatcctgtcccaggtggggtcaggtcctgagacagggaagctcaaagaaaagcctggccaccagatgagtttcacacaaactgccagccctgaatagcttgagccatttttatacttcaaaaacaaacatgtttttcttacccccaacccctcagcatcaacctcaggcaaaatcaaacatttttttctaattttcaaatcaaaacaaccatttatttatttgtttgcttttatttatgcccattggtgttatgccatgggtgtgggtaccctagaactggacttacagacagttgtgaggttccatgtgggtgctgggaattgaacctaggtcctctggaagagcaaccaatgctcttaaacactgagccatttctccagccccacaatacaacttttaaacaaaacaaaaaaatgtagtaatacattgtttgtaatctaacaaataaagcttgcctgaagaacagaatgcagagttaaaccactagttaacaacatacctggttaagagctaagccacaaattagccacacacacacacacacacacacacacacacacacacacacacacacacacacacacaaagccactatttagccatagaggacaggcagtggtggccacacctttaatcccaaccctcaggaaacagagacagatggatctctgtgagttcaaggccaccatgtgctacatgagagtgaataattctaaaggagaaacagagctcacacctttgattcaaactagagaggaaaataaggcaggagctcagtgcagtgcagtgcaatgcagtctgaggtttttggtggagagcattgcagtttgcagtcatgctgaggacagggtctcccccttgttctgagccttggtagaggtaggaactctagtggcttggctgctttgtttttctgaccttcagcttgaaccctaatatctgtctctgtgtttttattattcatgttataatatgggaaattaccaatatggagccaggtaaaaatacaagggaatttaatagggaaaagccttatttacagaactacctagccagctggcagggcagtggtaagtacagcaagacaaagatgaatgtgaaagcaaagctgccacataagtgtccctcactctttggcactgcccttttaannnnnnnnnnnnnctaagaaggcagggctacagcatcccctacaattccccttttagtctaaaaggggattaaaacttaacagtgtaaagtatccaaagttaacaatcataaaggtgaaatataagaagataaaacaattggcttatgtcacatcctaactatgtctattttaactaaaccctaaagtcatctgaaagaggtgtccaagcctgaacacctcattccaatcccaaccataaacaataggaagttatccctaactaggtgtatacactatcctaagtgacaacaatgggggaaagggagcatagcatcctccaagatacttcctgctggaacgggagggcaatagccttgtggggtcctgtaggaagaaaatgttagtatagtgaaagtcatgaatacatagtatccagtccatgttagatgggattcacttgattgaagatctcgattgaaatcctcaacttgattgaagtcagcactcaaagttttggccagagtgtcagttgaaatgaagcaagttggatccagtgccgtcaaggaggtatggcccattttctttctggggaatccagggtttgctgtcaggcaggtctccattagctgtgtgggactcaaacataaatgttagcagagaaatgtttgtgtaagtatgtatactagaaaaggcaacaatgggagcataacaattatgacagggtgtacaccttgaaagaaagagccaagaaagacaaacacagtactgaaattcttctcttattctgtattacatcaaattgccttcttgatacaatacagaaactcgaaaatttaattaaacaaggtgcttggattttagaggaggaaggtcaaatccacctctaaagccagcattggtttaattgaatagggactaggaaataaagagaaatagagtcgtttgagaaacagctataaagtttaccgtaatggcacgttactgttccttttgtttgatggttatagctaccttctcttcttaagtatctacccatgcagtgtcctttgatttctggagatgagttttcctgtgaagataaaagcaaaacaattccctttgggaattactttgggaagtttctatttagtttatgagatataccttaatagaatacctgtcatttctcctcgttgagaagtttttccttttcggctcgaaccttgatcaactttgatggtatccaaagtttttcttctaccatggaaacaaatgcaaaacacctaccccaacataacaaatgtcctggtttccatacagaggttagcacatctttgtagtatactggttgattcagttcagcagttttctccgtagtccagttctttctgcagctgtttgtcctttctcgttggcattaagaaagtttggtgttaataaagcattatgtaaactatgtttgggggattttgtcttccaagcttgtttgtggagcatctcctttagggtcctattatgtctctcaaccactgcttgtcctgtaggattgtgtggtataccagttacatgctttaagttataatattagaaaaacggttccaattttgtggagatatatgctggagcattgtcagtttttatttgtgcaggtatacccataactgccatcacctctagtaggtgtgtaataacagaatcagccttttcagagttaagagcagtagcccattggaaccctgagaatgtgtctatagtatgatgcacccatttcaaatttccaaattctgcaaagtgaaagacatccatctgccaaacctcatttctccgaatacctttaggattacagcctgctggcaatggagtttgattataaaaggaacatgtaggacactttcttactatctccttggcttgttgccaagtgatagagaagtcctttttcaaacctttggtatttacatgaagtttcttatgaaattctgaggcttctagcaagcttctaattaataaacaaccgttctcatcattgccttgtgctaatgggcttggcagaaaaatacaggacctgatatgtgtaatgtatataggattattttgtttctgattgtttcctgtaattatgtaaacagtgaagttaattttgtattatcaggaatgaattctgcagtctcaatgtgtaacacatctctctgcatattgagaatcagtaactatattaagaggttctgtaaaatccaagagtaccatgagaactgcatataattctgccttctgtacagatgtacagatgtatacagactttgaactactttgcttacctcacctactttatatcctgccttacctgatttgacgacatcagtgtagaaggtaagaactccagaaatgggagtttgtcttacaatacgtggaagaatccagactctcttttttatgaatttaattctgtcagttttgggatagttgttgctaatcattcccaaaaagtcagtaagagctatttgccaatattcattatccttccacaaggaggatatttcttcattagttagaggtatactataatttctgctggatgttatccagtcagttgacagagtcttaatttgccctttagagtcaaatcagaaaacttttctatgtatgtctttaacttttttattctgttatgtggcagaagtatccactccaatatggtggtcttacctctgcatcagaatcccagaagggtattctctggatggcaagataacaagaatacagtctaaatcaaggtttatctgatctacatgtgcatccaatattctgttttctacccattgtcattatttttctgcctcagcagataatattctcagactctttagtccttatcacctttaagggccattataaatgctttaagtaatgtccttcttccccaataatcatctatagttgagaaatttccgctgataatttcggaagagaattaagagtttgatagtgatcccttctaatttgtaccttttgaggtgtggttctttgtaagtctattttgtaacctaaatagttaatagaatctcctctttgtatcttttctggggcaatctgtaaccaccaatgaggcataacttccttcaccatttcaaacatactttccaaagtttccttattggaatctgataaaagaatatcatccatgtaatgataaataagagactgtgaaaatttcttacgaattactaccaaaggttactgtacaaagtgttgacacaaagtagtactatttagcattctttgtcgcaaaaccctccacttatatctcctacctggctgtgaattattaagagttggtacagtaaatgcaattttttctctatcattttcctggaaagttattgtggaaaaagtctttcagatcaatgactatgattggccatccttttggtatcacagaaggcaacaacattccaggttgcagagagcccattagttgaattaccttatttatggctctcaggtctttcaacattctccacttacctgacttctttttgataacaaatacagaattccaagggccactagattcctctatgtgtccagcctctagctgttcctgtactaacttttctagagcctctagcttctcagaggtcataggccattgtcctacccaaacaggttcatctgtaagccacttcatcggcagggcacttggcacttctgaaggtctatcatttatatttagtttctgtagtttagattctggatggttggtaaccattttccatagcgtcttaccagatcttttctagtatctaaagattctacataatttgtatttgacactggaggaatattaatctgagtattccattgctgtaagagatcacgatcccagagatttatggctatatctgccatgtatagtttcagtctccctttctgtccttctgatccaatgcagaccacagggttaannnnnnnnnnnnnnnnnnnnnnnnnnnnnnnnnnnnnntctgtcgaactctagatagagtcccaattcctaaaaattgtacatatgcctctttaagaggtcactttgaggccaagacttttgggtaataatagttacatcctccccagtgttcaccaagccagtaataactttattattaattttcactttctactgaggtattttatcattaagaagtttgccaaaatatgcgtttctcattttgtccagtcacatttgattcttcatcgctagccaaactacaatctagagcagtattatttttcaaaataggcaaagaaatatctattcatcctgtgagagattgtcttccactgctactgggaatgaccagacctttctctatgtggggcccttcttgaggtgcccccctcggagtttcctggttttaacgggtttccttgcatgtccctcgtcgatctacattcattggtcgagtgcctgcccttaccacatcttctacacaatccagaaggcagtggccttccatatgaggcattgttagaattcgtttgtctacaatttctcttgatatgtcccattctaccacagctgacacatctaggttctgggcgcctttgtggtctcctggggaaggctcttcctaaccaaggttctggttcatagtagtagtaacctctatcctcttggtacctatgttgacctctgtaaggtgcttctccatcccaagaccttaaatcctcacctctagaacttttaatctcctattgcctttttaaacctttcaagagggcttctcctacccaaactccagtgtcttgcacattatagtcaatgttggctgcatgcaaatcccgttcttctagtggagctgatctgacctttaaaggcaaaaatactcttttgcatattgggtttgcattttcataagctattgtatatataattgattgtctcgtttctggatctgttacctgtaattctcctgccttagttaacctttgtaagaagttctggaactgttctgtaggtccctgctctattctagtataagcttctaggtgttctcctggctcacaaaccttatcccaggcatttaatgctgctttcctgcatagggacaatatatggtcgtcatattcggcctgagcctgtgggttggcatagataccctcatcaagaatcttatttaggggggcttcaaaccctttctttatgccttgatgctcaaggagcttcacttcctccctgaaaaatgctctccatttgatttggcatgaattctcaagtacagctgccaccaatcattcccaatctatgggcatcattctgttaaaggttgcctatgaatgtaatagctgttttacatatgggctatggagaccacatgagacaacagattctttaatattcttaagatccttcagatatgtaggttgccatacataagccatctgtctctgagggtgtttcttagaagttgtttcttttctaccttggtagctgggtatactaatggtgtatgagtaacaaacttagaggaatagtcatgatacctgggtggagtaggggcctcggttggagtaaaggctcccaacactttatttttgcatggattgtgcatattttcattcatgtgcttattttcttctctaaattatgcctacagatagaagtcctaggttagagacatgaatgcattcaatgttagcatagaaaaatcaaaccatttccccaaacagtttctctctctccctctctctctctctctctctctctctctctctctctctctctctctgttttagaatttgactaagaatttaaccagggtagtaattctaaagaaaagagtcatttgttgaaagcacatttttctcttttatttggagttttatttgatattttaataatattttgtgctgttttttttcagctactgcgcaaaacagtgagtgtggctggatacctagcagaactggcttttgaaatcctgtcactgcacattcactctgacctggacaaggtgtttgcttttgctgagaggctaagctgccaaatgaatttccacttcttttgtttctaaactgttaaaacgacatgtagtcacaacagccgtggatattctactattgaaccatccttctaagattgactgcatacagatttttacagaaactggagagatggctctgtgggtagaagtgtatattgctcttgcaaagaacccaggtttagttcccagtatccatttccagtaactcacaatagcctgtaactccaaacacaggaagtctggcaccctcttcgagcctctcaaacccctttgcatgcatgtggtgaacataaatttatgtagtctcacacacacatacacataaataaataaatcatttaaaaaaatttaaacagtgttacggctggatgtggtaacacacaagaaatccaaacactgagaaagctgaacaggcaaaactgcaaaaatccaggcagcctagagttcaatgaaaatctggctcagaaatgtaactttttcagtgttctacagaattaacaagaaatgatttccttcatattaaaaatgagaattcaatccacacacacgatttttctgtaaatttttagagaaagggattcattttcatataatttcccacttcactctcaagatagcagtctttataatttttctaatattctttagataaatttagtaatttttaattacctaagaatagtacatatagggtgagcaacagtgaactagctatgattaataaagatatttgagagagaagtgaacaggaagaattaagtccaacagaagatgaagaaggaagatgtggaagtgagttatagaaaataatctaaggatgtctacttttctcattaggaaacttaatgacaataggcagtccttcagatattggcaaccatgtttatgtgtcaatgactcctctaagaaaagctgcatttgtggctgcttgtggagcagactgcacaattccagggccatcatttacactgtggtttatgagactggtactggtgaactacttagtgtaaaacctatgtgtcaaacagtgactctatcttaagcatgctgcacattaacgtttatgatcctatgaagagagttctacagcaatattccacttcacacataataaagctaaagcaaagaaagattaagtatctcgccaaggatgccacagatggatataaagccagactccaattcaatttccagaccaccacacttctgcataggcaataaacttctgttgaattgaactaagatgtacagaacttaaaataaatgttgctgtgagtacaaagaaagaagcaatatcaattcaggagagatgagaaagaaattatgtggagaacaggaacattaaagcactgatagaggctactgctagggtgtggagcatggactagagtaggaaagagatccatctgcaaaagaattctacactctttatcaatgtattcattgacagttgcatgcatctataatatattccactactctaccatctcctattctcccaccaatcccccatcccacttctgtcttctgtcttaatatatattgttttgacttcgaggcctactgagtttaaccgggaccactcacatggccatgaatatgaaacatgagtaactcagcagtggctacatcactgtagacaaggacttctttcctatttgcaccccagtgtcattaggtgctctggatgcgacaggacctcataaactctattctaactgtggccctttagttttaatacaaaaagaagagagttccatgagaaatacccataagatacagagaaaagataatgttataatttaaaaataaagcaatatagtcagcctcaatattcctggctgacattatcactcaggtacattttattttaatgtacctgagtgagtttctgcataaatgtgaattctggatgttccaagagagggtagacgagattggattcattggaactggagtcacaagcagttgtgagccattagatttggtcacagggaactctagtcctctgggaaagcatcaaggactcttacccactgagtcatctctccaatcccgagctgtgccttatacagcatggtgacaaaattcttcaaataacaaaagctctagttaagaaacctcaaagaaggaatgaagaattgtgcatacacattgactttgcactgttaaaaactgtgaatgtcagtgccctagagataaggccactatctttctggattttcactggctgtttatagtctgtatgtcagctctagacccaaaggagccttacttcaggccacttgcttcatggggactcctaaaactgtgtacaatggaaggctaagattgttttttatgatacctatctttcacaattaatttattggaaagaaaaactgaaaatctcattgtggaaaaatatattaaactacttatactggcatttacaaaactccttaggatttaaggaatcatggattaactcctagaagggacataaatgaattctgttctgctttacggatattgaagctgccatctacagtataggtgttttagataaggaagtgtattcaccaaacactgtgtgtattttgtctgtaggtatacacttgtctttctccatctcatccctaggttcatggcttcacatccactgaatttgttgtgaactccagattttgcttctgataatgtcttcacaaacagcttctcctgaggaatgtagagctagttagtctcaacatcattctcaaatggtgttttgtctgtagtcacagcatataaacacatagagcactgtcaagctaattttctagttgtttacaataaaacaattatttttaataatagttcatgaggatattgcaagaattttattctgaaattttgaattttatgaacttttcagcattcatattgctttttattagatagacttttcagattattttatccccacctttcacacaaatgttacccaacattttcttttgaaaggatagatgcttacactctatatgtgacgcttaattacaataagtttttagagatatttatcataaattccttatggaaacatatagaaatttgagctggttaatagcacaattaataatatttagagttaaataacaatataattaacatgataattaataaattggtttgtaactgcagggagctctctagtggcttagttttttgctctgatataatttagcagttgccaggtatttttggtacattacctagaatacttttcaaagaaaatgtttaaacaataattttaaaacaaaataatttaggtaaaaatttaatttgtaatattttaagcataaatagtatagcaacatggaatgtaatgtaacatggatttaaaataaataatgctatcaagagaaaagaattaacagcaaattgtaaatgagactgaagataagagaaaagacagcatgtcaaatgctatgtcatgatagggcaaaattatgactgatttgtacacacatatacagacatgcacacatctggttttggtaacattagtgaacaagtaactcaaaagaatttttgaagattttttatttgataatcatgtacatatgtgcatgttggtatcaggatgaatatatatgacggagtctggggaagtagactggtaccttgggactggtgttacaggtgcttatgagccacccaaaataagtgctggaaactgaacccaggtcttccacaagtccaatgtgtgctcatacccatagagccaactgtctgaccccagttccaaagacattcaaaattcagtgtagagtgtagactatttctctctctctctctctctctctctctctctctctctctctctctctctctcttcctctctgtcacacacacaagtgtgattataaatatttcaagaagcaaatgataagtatgtttacttgacagacacattttgaaagtgtgtttctcacctcaattataatgtcttagtaattcacttataataattaggaaaatgtgtaaacagggatgaaaatataattgtctttgacttatgataaattaaactagcctaattccagtccatcttccaaatctacaaagagccatgccaaagacagcttgacattttcacacagtttgcaaacgaaggttttggcagtgagttccattgttaaataagtcattaggcactagattcgtcacaaaacatacaaaattgatgtttgtataatatatgcacaagagatggatttcaatgttgttaaaactatagttacattgtcagttctcaaatggcaataactacttagtatgtatataatattctaatacattatttagataatcttaaatttagcaaaataataaggaaaacaaaagcaatgaatgattctttgtcaagagtctatccagggctttcctctgagggtctagtaaataagatgcttaagaaaacaaggaggatgagaaatgcctttgccagagtctagtataggatctattcagaagatacaagagctgtttctctgagatatttaggaaaacatagaggaacatggaaattggattatgtgagaaataagtttacttagatggttgaaatgtatgtataaaggatgccttaacacttgtaacccaaacatgaaccaaaccaagagcagctgttttgttcttcaagaaacaatgaacaaaatacctgaggccatactgctggaagatcgagatgatctagaattgttggaattagagggaaagggttgtacaggtcatgctaagaaattacttctgtagggaagaggagccaaatatctaaagggtatggtgtgaacatatttcattattccttttttacaaatctatgctagtttcataatttgtgaccaactatcaattaatcattacttgagcatcaaggagtgtgataaaaatggacaaaggaatggtccaattcagttgtctctttctggaacttactacatagcagatgagataattaaaaatatatatcatgtgataaatgtagtggcatcttaccttatcagtgaacttgtggtggtggccacacacttttagcatggtttaaggtgcagacaagacccattataaggtaaaggaggggctggctcttgctctcttgggttgtggagagcatctgaagggtagagactgcatcttctagagcaggaagactgtggcggctatttattctgtgtaagtgcttccctaataaatacctacttatcatctatgttgagtctggtggacttatttaaacccctccttcagataattgctaaggaaagatgaggcccaggtgcttcttaagagttagcaaagacatctgtcaatgataaagaagaaaagatacagagttaggaaagtctagaataaaatgatttctacactaagatgggaaaagatggcaagcaccccaagcagggaatgaaatggctaggtatattagacagatgactagcatcaaataaaatagctgcatgactgacagctaatctcaggaataacttagtatctgaaatgtgacctaaaactctgtattttctcagagcgatttgctagagacaatgtaaaatgttaggcattttttaaatgttatccacatcagaaagctatgagatggtggaataccagaataacatagtcatattaatgtttaagaacactgcaggtggaatgaattgtcaagatattgcaaagttctgaagggatggtgatgcccatgctaggggtgtagtggagatggagagacattgacataaccagaagagactgggggattaggatggggattggtgtaaattgaagaggaaatgggattacagctaatattttaagcataaatagtatagcaacatggaatgtaatgtaacatggatttaaaataaataatgctatcaagagaaaagaattaacagcaaattgtaaatgagactgaagataagagaaaagacagcatgtcaaatgctatgtcatgatagggtgtggtgtcagatagaaaggaatgaaaatgaatccaatttctcaagtgttaagattctgattcctaaggacacagataatgcttttctgaagttcctttgaaaatttgagaaagagttaggcacacatttacataattgagatttgtctgcatactgctaagaaacaaaagatggcagcaaggcatttaccccattctagataaagcactcccatcatagcatttaggcttctactattttgctcctttcttcaatacaacttgataattggagatacaccttatttcagtgtcagctcaataactggaagagaatcatgagtctaaaattataatacactggtgtgtttgcatagacaagttgccagcttcaaacctgtcacaatctggtcaatggtgtgcaagcaaagtagaaaactcatatttttttgtaaaacatgaaagtggttctgcctccccagaacctaggaaacatgaaggactctaagggataaatggtccctaggaatggaagtagcatgaactgaactaattgggagtatgagggggggagggagctgctacaataagagcaagagaagaggagtagaggagaggaaatggagggccagaaatattgagttgggggaagaatagaggagagagggcaggatgagagataccatatcaaagggagccactataggtccgagaagagatctgcaactagggagatctccagcaataactacttagtatgtatataatattctaatacattatttagataatcttaaatttagcaaaataataaggaaaacaaaagcaatgaatgattctttgtcaagagtctatccagggctttcctcctactacagtgaagacatcattaaacacctcagagaaataaatatgtcttcacatgctcatagcaactgttgtgtgttcatgcctttgagagagcattgaccacctctgaggaacacatgctccctgagcctttctttaacctgtgtacatcatgactgttcattcccaactccacagatcccaatctgctctggactggctagcttcagactccttaaaagacttgtatagcttccaaaactcctcacagccctgtaggaatgatgtatacagagctgactggtcttatgtagcaaatgaaggtagcatctattccaagcattgtgagttaaataaaataggaaatatgcaaagttttaagggtagaatgcactctgtttagttagtagttggcaaatgttcatgtgcattttctataacaaacttccttaaactatcattggatttcctgagagaggtgtggctgaggtgtgcattcatattcagtcctttgatcattttcagaagactcaagcaccccaaacagactagtgctctgggcttataggggttatcaaagctaaaactatcatttttatattatcatctcactcttcattgacacaggaagacctaagaagaagatacattctctatgctcatgtaatcgccacagttttttgtaaaaatgcaatgcagaccaatgtcagtaagtaaccagattctcccttgaaaaataggaagattgaaaaaataggaagtttgatctgggggcatttgctatcttgatataaagaggtattggatgttggacttcatcagtgtgggtgttaatctcaaaaaatctggttttatgaataattttgtgtcaattgcttctaaattagatccatatttcccctttgaattcttaattagtatctttgctcccatctaatttaaatttaacatttttgttttctttgcacagattctatttctgtgtgactctaaaaatctctaaaagggtgtttctgaaagagtccagatggtactgataattatttattatctttagcttcacccattatctgtcatgcaatctgtgaactcgaaaatcttgttcagactctgagttgccattgaaattcaatgaaaaaagtctcaaatagtaagttcagaggagtcaggcatactatggaagtagaaatactttcaaagacttaattaaaagtctgatggttgctccggctgaacattgggattttatgactctaatctttcctgctcatttctaacttgttgaataatactgggctatatttccatagaacttgtcaatagtgtgaattaacttttatctttcactagactgaaactgggcagtgggggaggggtgatcattgcagacatattcttgccaatgtaacaattgactaagggacttcagttaattttcactgaagggaaatgaaggcattcctccttctgcaaaaaactggaggggatgtctcacaacatcagcattaccatatgaacatcttcaaaaactagaagataaattttatattattacttttactttaggaccaaacctagtaaatgtctggtacattctaattatttgcagcctctggaattttcctcagtttcttgctggacacttaaaatgtacaaactttgctccatccagaaccatactatttaatatttcctaacactttatgctcatttgtgatataacatttactgcattttattatcatttattttcatctctttctttagatgaccccaatgtatatttccatagaacttattgtagtgtgggttaaactttcgtatctcagtgttgcacatggaggcagcaacaaagaaatattaagtataaagcctactttttctcataattatttttgttttaaaatatcatgcagagtagatttgtgtgtgtgtttctttaatacatcccagctaaattctgaagtcccacttctatcatgacaaaataatccataatacatacactcatcccattctaaagtaactgtgaaagaggacaaaacttcatgaagtaacatttcataagctagacagcatgtgtctcagaacagacacctacgtaaaggatgtcatcacatgaccataccataccaccccatgaccatatcacccatgaacataccacatttccacatggccataccataccaccccatgaccatattactcatgaacataccataccaccacatgatcataatatatcacccatgacaataccataccaccacatgaccataacattcccccatgcacatatataccattacactaacatgccactccaccacagaacatactcttaatgctttctgacactaaaggacttatttgcaagacagagcagtcaaagtgaactgcacaggcaaaagtaacaacatggatatcttgaaactgggtgtgacagaattctaaagtggaaaatgtctgggtgggtgacaacattatatataaagtactaggacagaactggatcaagggtgagacttcctctcatagaaagactttgagaccagtaactactgctacagggtggaggcacacagaaatgctgacagcttccaaccacagaatgcagccaacgtcaagagagctctctgaacatcctggaaattcagctgacactagaatatcttaggcccatggatcattccccagagttgctgtcctcaaagtatccttgattatcaacctataggaggcaactatatagtcacaggagtccagaaagtcaaaagagtttccattttaacaccaacagactattatcttacctgtgttaatatttgcattgacagagaaaaagtaaatgtgaaacttgtcacatacaactatcaatcataacatgatgactgatctgctgaaaatggtgcactcctcactgtaggacactgattgtataagattaatattactactacattcatatttctttattcaacctaaaaatgtccttgatgaagaagtataatttcttaatttcattaaattttgatgttgcatatatattattaacagcctttgtatatgcataaagcacctcagctgcataccaaaataaaatagatatcattaaaaagcaaccatacaatatctgagctacaagttacatactttttcctggaatggttttccttgaaagatcaatcagaggagatgttcaccatgtttgaatactctgtaggcacattctaaaagtttaataaactgaaaatttcaagaagataattcagaatatttatatgaatgagaaaattttaaatttcaaataaaaattgtgatttttgaaaaattgcatctgcttctatgataatgacagattctcaatacttagtaactctctaaagacatagtgagtatagatatgcaaaaagcttattaatggtgggatgtggccaacttatcagcatgctttatgacaaaatcctacataaggaaatattcctttgaactgtcagcaacatccagaagattttagtatatcaaaacctagggtttggtgagatagttaagaagataatagcacatgttgcttttgaggagctccagcgttcattgcctagtaccatgtggggcagctcacaatcccctgtaagtccactttccaggggtgcaacaccctcttttaacctctgtgagtactaacaacacccatgtgctcatgttcacatacatatacatatgaataaaaataaagtatttaaaagataaatgaataatgactttaattccataggtttctgtgtgatcataaattgtaatttaacctcagtttaattcaaatgactgtgttcaggataacacaaagatcctatttacacagttgattcaggtttatataacatgctgcagaaaggacattttagaggaatagtaagccatgttttgtttaaacacaaatttgagtaggatcctaatattttgaaagtagttttggctttaaatatataatcacattttgtcatcttgcttttttaactgtatgcctcattcctgtaagcataacaattttaatgtagaacaatgaaagaaggaagaaaaagaaacttgttattttaaattgaagagtatttctagaacacagataatgtcatttcccagttggtttctaataagagttcttctctatactttggctgttctgggcattagcagggtatgtgaaccctagccaatgagagaagactcctccattatacttacacctctcagttcagcactgtggtatgattccctctgtaattctaaaagaaacgggttctccatttggggtgtttagttttgtttgttgttgatgttttcttttttcataaattctcctagattattattttaaaatgcagtcctattttaagatacagaattcaaaataatgaagtcataaaatacagttagtgcaattcactaaaatgcagaagtatagatgcctcacaaggacaactcttataatcccattactctgcctgccacgcatgactggctgccttgtgtgttagttctattcatttcttattcattcatttatttatttatttattcaatcttttgcttttacacagtcgcatgtatggttttcctttcaaattatttgagctgttgaatagaaatacaagtaacctttggctattgttactgtgtagaggaaaactgtacacacatcaattaatcataagtttatttgtagattttagctgttacctgtgtgtaaaaccatggtatctgcaaatggtaagttgtttctcttcgttttcagtccatagaactttgcatcttgactttgagttttattccactaccctcaattcttcagaaaagccttgaatgctgatattattctaggttcctgtactttctcagaaaaacatatttcattatctatcctttaatctagatacatctcaatacattaagtatggagaggtctgtgatgtcataaacttaaccaaattaactgtctttaaaaaccacttcagaaaggctagggaaatagctgtgtcagtaaaacactcgctttttaagagtaaggacctgaattctatatcggaacataggtcaaaaagcaagacacaatgtgctggcaacaaagacaagtgggacttggaggctcatgggccagtcagcctaacctacttagtgaattccaggccactgacagaacctatctcaaataacagagggaaggacacctgaagttgtcctctgggtgccacaagcatgcatacaaagataaacctgcatacacatgaatatacacacaaacagcaacaacaattactgtcaataacaatcatatccctgcctatcttacaaaagaagatagggaatatctgttttttagatgaggtaaaatcctgaaacaatagctatctttatacattccattataatcattataatccatcttcttctaaatatatttaattttgtaatcaatacaactcagggattctgcctcagagtatcaggggtgtcttgtctttgtgctaaactttgtcagcatatgggcaataactcctccttctgtccaaatatggcttacttctcttccaaagctgttcatgcctatataactctattgacatcttttctcttttaaaaggtaaaatggcacatactgacaactttttatgaaacagtatgtgatttaacatgtgtagtatgtaacatggcttttgaacccaaaccactggaggaaatggtgcatcaacagggtcatttctccattcacatatcccactacagacagtgtcatgtaaggcttatgcatctcctttctgaatagaaatcaaagtaccaagtgataatatgttttagttcacttcaattagtccaccagaccacattataagagcctaaaggccatcataatggcatcacagaatccatcttcacagtttttatttaaagatatcacatggacgtctggcttgtaaaactccatgaaaaataattaactcttgtcagcattctgtgtcgttatgttcagatatggaacatttattaatattcattacaattttgtgtaaacgaagaaaataatatataattaaaattttcaacagataaactaaaaggtataagaaaaatgctttttaacaccaagaatctagtgtctagcttcctaatgcagatgtagagaggtggcagtaagtgctaattacaatgatggcatttaatgtaaaaaatgtaatgggcaatgcatgtatggaggtgtgtatatgtggctgacaggaggacttattttcaggcttttccttaaagagtcagtcagatggaattttacccaagaggaaaaaaaaataatttcattactatagttattaatgcaagtctttgggaaagcctctatcaaataatcttgcatggttgaatacatttatagacaaaataaaatgtcagacaaaatctaccaaaattgcaatggaaaaaactttttgtcactaataggtaggctctagaaaatatgcttatttcccgaaataaacttgcttatttagcgagtgcttgccagtgggagcccattccaaaactgagggaaggaattgaaaatgaaaggtggtttttgagcccaattcaaaactgaatgcattgaatgactccacctctctaacagcatgacttctgagaacaccaggaaatttgctgaaatgaggaagaatgtaacttttgtctctgtattggcagtgttttccatcaatccctttctaatactcttaattttagagtgtaaaagtcactaccaatttcagaggcacatttgaagtaatagtaaaggaggatgcagtcacatatgacaactcatttcaggctgagaactcacagtcccgatgccaactacactgttcttaacagaggtggagtgccctagaccttacctaactgcacaaagtatagtttacctcactgttgacaattcctattctgacactcaccctgtgatctagcatcccagagttttacaaaaactaaaatttgagattttaaccattcatatgtcaaaaaataaacaagagtgttataattttaccacgggagaattgagatgactacaccctttctaccattcgtagattagaactaggatggttttcattattgcagattttctttatttgaattagaaatgagattgtttacatgacagtcctagttcctaccctaccaaccccccgaactaaaaccctatctatcaaatatactttctactccccctagatggtgaggccttccatagggtgtcatcagagtctatcatatcctttgggatagggcctaggcccacccccatgtatcttggcacacagagtattcctctatgtgcaatgggcacccaaactccacccctatgctagggataagtactgaactactacaggaggtcccacagatttccaaggtttcctcactgaaacccatgttcctgggttctggatcagtcccatactggtatcccagctatcagtgtggggagcaagagttctctgatgttcaggtatgctgtttctgtgggtttcaccagcctggtctgaacccctttgctcttcattcgtcctcctctgcatctggattctggttcagttcagtgattagctgtggatgtctgcttctacttctaccagctgctgcatgagggctatcaggtggcatgtaagtcagtcatcaatctcattatcaggggggaacatttaaggtatcctctcctctgttgcttagattgttatctggtgtcatctttgtagatctccagacatttccctagtgcctgatttctctgtaaacctaaaatgcctccctctattatggtatctccattcttgttatcttctattcttcacctgattcaaactttctgcgccctcatgacctctgcatccctcttcttctccccttctcattctcctagctcctcccacctctttccatgctcccaatgtgctcaggggatctcgactcttttcccttccccaggggaccatgtgtgtctctcttagggtcctctttgtttacaagcttctctggcagtgtggattgcaggctggtaatcctttattctatgtctaaaatctgcaaatgaatgagtacataccatttttgtcttattgtgattgggttaccatgctcaggatggtttcttctagttccatccattttcctgacaatttcaagattccattgattttttccactgagtaagtagtactccattgtgtaaatgtaccacattttctctatccattctttggtttttggtcttttggagaccagcttcttgagttctttgtatattttggagaacagctctctgtcagatgtcgggttggtgaatatttttacccagtatgtggattgctgttttttcttgctgactgtgtcctttgccttacagaagcttctcagtatgaggaggtcccacttatcaattgttgatcccattgtccatgctactggtgtaattaatgttcaggaagtagtctcctgtaccaatcaattcaagggtatttcccagtttatcttctaataggttcaatgtggctgggtttatgatgatgtctttgatccattttgacttatgttttgtgcagggcaatagacttgggtctgtctgcagtcttctacatgtccacatccagttatgccagcaccatttgttgaagatgttctctttgttccatcatatgaatttggattgtttgtcaaaaatcaggtgttcataggtgtgtggggtaatatcagtgttttcaactctattccattggtctacctgtctatttttgtgccaataccaagctgttttcaggactatagctctgtaatagagcttgaaatcaggcatggtgatgcctccagaagttactttagtgtacagggttgttctggctatcctaggtcttttgtttctccatataaagttgagaattgttctttcaaggtctgtgaagaattgtgttgggattttgatggggattgcattgaatctgtagattgcttttggcaagattgccatttttattatgttgatcctacctatccaagagcatgggagatctttccattttctggtattttctttaatttcgttctttagagactcaaaattcttacaatacacttctttcactttttttgttagtgttaccccaaggtattttatgttttttgtggcaattgtaaagggtgatgtttctctgatttctttctccaccaatgtgtcatccatatatagtagggctagagacttttttgagttaatcttgtatcctgccactttgctgaaggtgtttatcagctgtaggagttccctggtagactttttcaggtcacttatgtagactatcatatcatctgaaaatagtgagagcttgacttcttcctttccaatttgtaatcccttgatctccttttgctgtcttattgctctagttagaacttcaaaatcaatattgaagaggtagagtgagagtaaacagccttgtcttgtcctggattttagaggaattgtattgagtttctctccacttaatttgatgttggctgttgggttgctgtatattgctttttttatgttgaggtatgttcctattatcccagatttctccaagacctttatcatgaaggagtgttggattttgtcaaaggatttttcagcatctagtgagatgatcatgtgattttttccctcagtctgtttatatggtagattacattgatagatttttttgtatgttgaaacatccttgcatccctgggttgaagcccacttgatcatgttgggtgatttctctgatgtgttcttggatttgatttgtcagtaatttattgaaaatttttgcatcaatgttcatgagggatattggtctgtagttctctttcttagttttctctttgtgtggcttgggtatcgaggttattgaagcctcattaaaagagtttggcaatgacccttctgctgctattgtgtggaatactttgaggagaattggtattagctgttccttgaatttccgatagaattctgtactgaagccatctggccctgggctttttttggttgggagacatctgatgactgcttcaatttcattagggtttataggtctatttaaatttcttatctgttcttgattcaattttagtaagggatatatacccagaaaattctctattttctttagattttcaaatttgaggaatacaggttttcaatgtgtgacctgatgattctctggatttcctcagtgtccgttgatgtgtccccgttttcatttctgattttattaatctgcatgttcactctctgctgttcagtaagtttggataaaggtttgtttatcttgtggattttctcaaagagccaacgctttgttatattgattctttgtatcattctcctagtttccattttattgatttcaaccttcaatttcattatttcctgacatctgctcctccaggtgtattggcttctttgtgttctaaagctttcagttgtgctgttaattctctagtgtgattattctcctgtttcttcatgtgggtacatagcacttagcactccttcctcttagcactgctttcaaagtgtcccataggtttgggtatgttgtatccgcattcatgtgaaattctaggaaatatttaatgtattttttatttcatcttcgacccaggaattgtgcaatttggtattacttaatttacatgagtttgtaggttttctgtaattcatgttgttgttgaattctaaccttaaagcatggtggtctaataagatacagggggttatttcaattttttttacctgttgaggtttgctatgttgccatgtatgtggtcaattttagagactgttccatgtggcactgagaagaagttaaattgttttgtatttggatggaatgttctgtatatatctgttaagtccaattgggccataactactattagttcctttgtttctttgttaagtttctgtctggtgttcctgtccagtgctgagagtggagtgttgaagtcttccactataagtgtgtgcagttttatgtgtgatttgagttttagtaatctttcttttacaaacgtgaatgcctttgcatttggggcataaatgttcagaattgagacttcatcctgatggatttctcctgtgatgagtaggaagtgacctccttcatgtcttttgattgattttaaagtccaatttgttggatattaggattgctaccctcttgtttcttgggtccatttgattgggaaatcttttcccaacctttaattcttaggcaccatctgtctttgaaattgaggtgtgttttttgtatgtagcagaaggatggattctgtcttcttatccattctgctaatctgtgtctttttataggcaagttaagaccattaatgttgagggatattaatgaccattgattgtttattattgtttgtttttgatttggtgatggtgccgaaattatgtgtgggattctatccccttttccttttgggtgtcggtaaagtgggattatctattgcctatatttttctggttgtagttaacttctttgggtagcagttttccttccctaattttttgtagggatggattggtggatatgtattatttgaatctggttttgtcatgaatatctttttttctctatctatattaactgaaagcttttctgggtatagtagtctgggaaagcatccatggtcttttagtataggtagaatatttatcaaggatcttctggctttcagtgtttccatggaaaagtcaggcataattctgataggtttgcctttatatgttacttgatctttttcctttgttgctcttaatattttccctttattctgtatgtttggatttttgattgttatgtggtgtgtagacctgtttttttttttcagtctatttggtgttctgtaggcttcttgtactttcattggcatgtctttctttaggatgggaaagttttcttctgtgcttttgttgaatatgttttctgtgcctttgagttggatttcttcaccttcttctatacctatcattcttaggtttggtcttttcatggtatcccatatttcctggatattttgttttagggatttggtggacttaagattttctttggtttgtgagtctatttctcttagtgtatcttcaacacctgagattctctcttccatctcttgtattctgttggttatgcttgtgtctgtagtgcctgatcatttacccagcttttctatttccagcattccctcagattgtgctttctttattgtctctatttcagtttttaggtcttgaactgtttccttgagagatttgttgatatcttgtatattttatttgttttttcttccatttctttaagggttttctcatatcctctttgagggcctctatcattttcatgaagatgtttttaaggtcattcttttctgctacatctgcattgtgatgttcaggtcttgctggtgtatggttccttgtctccagtggtgtcatattgggttttctgttgttgaatgtgcttttacattgtcctcttctcatcctttcttttgatgggtgtagcaggagtctcttcctctcctggtgggtatggaaccaaggttcccttttggtagatgcaaacagttccaatactctgatgtctgtcctcttgttgtggatggaggcggagctgttacctgggccttggcagtgtctgtgtgtgttggatcccaccttcaagttcagatctggtgagcagcaatctaggatgttttaatggatgccaaaatcttaatctcactcttcacacaatgcaggactctgtgctcagttgaagttccccccactcagaatcgttatctccagttccctccatccacatggaaatttcatttttcacaacagccgaactttccttcagtggttaaatatctaggctattttcattctctaggtctggtgaatagagcatcattaaacacaatgctctatgtttgtgtgacatagagtcttttgggtatccacccatgaatgatatagctggatcatgcagaagatctgtttctagctttttgaggattggaaatgctgatttccatcgtgactgcacaggttagcattcccaacagaggaaagtgagcattgacatctacctacatccatgtctgcatttgttatcaatttttcttaatatttgctcatttttactgaggataggtaaagtctcaaggtatttttagcttgcaattccctgataactaaggaggttgaaatttaaaagaaaaatttctcagtcatttgtacttcatctttttagaactccctgtttggtggcatgcttcaattgtttattaattaaaacacagtatttgtatccaatgtaatacaaatttgttttcctgatgtttagttttttgcatcctttgtatatttgagatatgaaacttctgatttttgtttatgttaatttgtattctgctaccttgctaaaagtgctcagaagcagcaggnnnnnnnnnnnnnnnnnnnnnnnnnnnnnnnnnncagagtccttaaagtcttttatgtatagaattatatcatctgaaaataaatataatttgatttcttccctgtgctcctttgatttcttctgtgtgttccctttgtatttgccacttatgactttagctaattcttcaagtactatattaaacaagagtggagaaggtgggaatccctgttgtgtttccaatgttagtggttttaatactttgagtttttctctgtttagcaaaatgttggctgtgggattgctttatatttcctgtactgcttttagatatatcccctgtgttcctagattctcctggacttttatcatgagtagatgaaaccaaagcccaaaaaggacaaatattgaatgttctctcatatttgcatgcttactttgaatctaaagaactttgcaaaagtcatatggacaattacaacttcagaaccttctaaaatgcaatgggctgctctattagagtttccatagtttcccaaatacgttgccattgctctttagaatttgatggggagactctgtttctaaagatagcatatacttgagtcattgaacttggagaaattgatctggtatgacctggaattttcattcctactggaaagtgctgtccaagctacttgaaaaaagtcttaccaagatgtgaattctgtaatatttggctatgtgaagctaaaacttttcaagtttgggtctctctcaaacatttgttctttaaatatagatattactatgcttgtaaaaaaaattgctgtagtcaccccccacgctccctacctttgccataaaatgtctagtgttggacaataaatatgttaagaaagatagcataaaaaagatctgagatgctatgagaggcctgtggcctgtcagtagaaaaggtaaggaaataccttaccattagaggcatgatctgagaaaatacatggagttctaagagcatgctgtgctgggaaaggagaggaattataaaggaatgaaatatgaaagatgatattaaacatgaggctagaacatgcttttataaagtcatgccaaagagtttgtaaagttctgttgatttccttcaaatttcaagtataaaaatgtactaaatatgaataaggaaagatttcttcccctaaatttctctcctcatgaataagagctcatagaactcacacactgcagaaaagcaataataaaatagattgaaggctccgctaaaccctcatcacaacaactccagcaggcaaccaaaagctcatttcatggaactgcaatgcaacattaaagcctcacagatgcaatttaggatgctgctccttttaattctacttaatgcttttataactatttcaaaaacagaactagctaatcgtttcatgattccaattgtcataatttgtaacatcaacacattggttctgcatagagcaactcaccattcaaaagctcataaataaaaatatagtacaattcctaaaacaaagaactctgctttcttgttttgttcttcattataacattacatttgtttattttatgtgcatatgccaggatatgtgaatgctactacacatgtgtggaggtcagagacatcttgaaagtcctcttcttctatcatttgggttcccaggatggaactcaagttaccaggcatggtggcatgtgtttttatatactctgccattttgccagcatttccttcttgctttcctgtattttactgagtatatttattcattcacaatattttaaaagcacctcaaatggacatgtctaagatacatacatagttgaaaagtgtgcttttgacattttcctcttatgcttgcattggtaacacaaacagatcagtccagacagaataccagcagctccttactcatgctagcttactaaagtctacagattctattgctaaaatacatcaagatttctttttacgacaatcaccattaccctgctcttccccataccctcctttcatgaggaaattcaaacacctcccacatttcatctctccctccactcctactttgtcatttgtctgctgtctgtagtgattcagaaataatactctaaaacacaaatagtagcatgacactcatctgcttaaaaccatcagtacttgacttgtatttgacaagtcaagaacaaaatgacaagaacacaggctaaaagtggtgcctttaaaagttgacctgatacttatgctcagttttagaaccctctacatgggtgctggcaagggcacatgggtcctatttaagatcagttcttgcttgtatccactgagccatcttaacatagactattcactacttattaactgtcccactaagggtttgaaaacaacatttttaagctagtagtatgtccaacacccattaatattatattgtctttcaagtaagccataaagttaagattggagactcatcttaccaccaccaaaaaaaataaaataaatgtaaacaagtagtttatgatcggtatacaatgagggtttagcaacttcattgtctcaaatggtttcaggaactaactagggaaaaaagggacagagaggaagagaggttgaaagaaaaccaaatttctaggcctcactctggccatgacttcaaaatgtaagctctccaaatcctaaacagcagggtcggtgctcacacatttgacagcctgtatgctgtaacttcattttctgcttgaaataaattcaggataaaatatctatatgtttcaaaagtgtactccataaagatgtgcagatgtacattggtccccagtgtgctatttcagattatagacagaacagggactttcagcttgtcgtgcaatcttgaaagactgttgacagaatccagctagagaactctggagagatcataggctctcaggcatgaatatgcacataaatgtgcatgcatgtgttgtgtgcatgtgcacacaaacacacacacacacacacacacacacacacacacacacacacacacacacgggaagagagagagtggggaagatggggagaaagataggggggaaaagagagagagatctacaaatgtctactgcctgttcatgcttgcaagactctaatccattgctgattcaacacgtctaaggcatggaactcactgtatcttaagttatatcattgtgttgaacaaataagaaagatactaaatgttacttgctatctacacctattcccctttctcctgaaaacacaaatagaactatttctatcctgtgggaactgatgatctgaccagtcacatttaaaagtatactaaatggcatcaagttatttatcaacgaagcatctaaactggccacattttagtatgtgtctgttgtacatagatagatgagaaatagaaatgatagagacagagatgaatggcaatagaaatgacaggtgtgtgtgtgtgtgtgtgtgtgtgtgtgtgtgtgtgtgtgtgtgtgtgtgtgtttagagacttactagagagacatggccatatcaactatgggaaccacctccatgcttatagagaaataaagatcttcagttaagtttgtcagaactaaaaactaagtgtgaggtaaggggaccaagaagtgaacctgtaagcatggtaaccacaaaggtgcctgtagtttctactgttgttttacaacctaaaatttccaacattcatgaagggttatcttccgaacttttcaaccaccatcattatgtggcttagcatgaagctggtcgagaagtcagagcacctggaagagcaggtgtggtaagagctaagagaacttaggcccagctgccaacaaggtaagccagcacacaattgttcatgtggctatcccatggtgtttcccatcctcctgccaaaatgtagaatgtattccagcaactttccaaggaagggagcagaaggaagactgttcgagctcaacgaggctaacacaatagaaaccctaaccactagtcatccattttattgacatacacacctcattctaaaatagttatgcacacttcttgttgctttttgctcaaaaggaaaaaagtattttatgtcttgcaaatgagacagtccaaaataagcccctgcataagtgtcacaagttgaaccagaaagtgggaacagaacacattccattttatcaccattctttgtagctaagaaacagcccatgtggtcaagcctgtaacatcagtggcataatcttgctcaggcagaagacatgaggtgaatgactgtatttgattttaccagatttccttacagtttttttgttttgtgtgtgtgtgtgtgtgtgtgtgtgtgtgtgtgtgtgtgtgtgtgtgtgtgtgtgtgttgtatgtttgtgtgatctacgaactccatgaagtataaagacaggatttctgttcagtcttattcatacagatgtttttcttttctatttacttttaaaagaagcacaggaaattttaaagagttactatattatgtaagaggggtgtgtgtgtgtgtgtgtgtgtgtgtgtgtgtgtgtgtgtagatgaccacagaatccagagttccttggtcccctggagctacagttacaggtggttgtgtgataccctacatgggtgctggaaagcaaacttgagtcttcagcaagaatagtacacattcttcactgctgaagtatctcttcagccctataggcagaattttgacattgcctttacagattttttacagcctttatttttatttccatgatcacttctcattcaaggcttcatgatttttgtttttgtcttttgcctgatgcatgtgtaggtcctgcagctatctgaattcatcaaacaaattggtgtgtgtgtgtgtgtgtgtgtgtgtgtgtgtgtgtgtgtttctatttggaatcccacactgaaaatgaactaaggtgaacaaacaatgcagtttgatgttcacctgcagagcctttgctttctgattcagatagaagttcatctctctgttgctttaggaaaaaaacaccagaacaataaaataagccttcattaaatctgatgtgaagttattctccttgtataagctatgtgggccctgagagtgtgttctgtcatacaagctatgccagggctcttattcaatatagctttgaacaaggttctacctacacttggcaatctgtcagatctatatatgaacagtgaattgtaggagccaaataaatcctatctgtacaaccaactattaccaacatgctcttaagctaaaatcctgagaaaattgtgtcaatttcttgttttttctcaaagcccatccttcctcttgtctatagacatgtgaagctcttaacagctgcattgtgactgaaaggtgaaatgaagagaccctggcttccacagctctgcaggtcatgtgttcactactctggaacattcacttgcaaaatggcttttattctagtctattttagcagtagccagaatttttcataacagggttcttgctcttcacccctacatcctagcatctttagtaaaggaaggtacagtgcatgctaccaaaagagacataaacacaaagcaagccacaaaccctaatttgatctacactggaatcctgcctgaaagatatgctaggataatggtggcccaacttgtgggagtaaacaaccaatatctgatttgactccatgagatggaacccatacctcacactgcttgggtgactaagaacctgagactagatagcctaaatactgctctgtatgagggggtagcaaataaaatgactcctaatgacagttatactcatagatcagtgccttactcagtcaccatcagagaaggttccacctacagccgatgggaacaaataacagctagatgttatgcagagaatgaaagacctgggaacactcagtcttaaatagcatgtccccatcaaattcctcctcttgggaaccagggaaccctgtggaagaggaggaggtagaaagagtttaagagccagaggggatggaggacaccaagaaaataaggccctcaaaaatcaacataatccaagctcatatgaattcagtgatactggggtagcatgcagagggcctgcattggctgtaccagggactctgcatatatattatgaattccaatttagtgtttttatgggatttctgagtgtgtcaacaagtgggtctctgtttccagtgccttctcctaggctctttttcttctgtttgtcttgttcaactccaatgtattagtttttattttatcttatattttatttattatattttattatcatcccttaaaagtctgtttgttttctaatgagagagagaagaaagggagtggacttggatggaagagcagaaggagtggagctgggcagagtggagggaggggaaactgtactcagatctattatgtggggggaaaagctgttttcaataaaaggataaacaaaacagagagctagctgttagaaattacatcattagtacctgtgatttgattggtttcctttagggtaacaagtggcagttagagtttaatttaataggaaaattacttgagcaacaaaattccatagaatcttaaatgagccatcaggcagaagtttctcttctaaataataaaatataagagtatttcttttcatagaaattacataaattgccaggccatggtggcacacacctttaatcccaacacttgggagacagaggcaggagtttaagactagcctgctctacaagagctagttctaggacgtcctacaaagccacagagaaatcctgtctcaaaaaagaaaaaaaattacataaatacatataagatacaatgaaagggccattctgcctgaacacttactattgcttaaataatatactaagtgcccacacagaaaatcacaggtgaaattgtcattagtttcaagaatagatgtacccatttccctctacaattattcaagtgaggcagagtcaacaaagccaatctttgaggaatctgtcttccttcagagagaagcaaatacactctcctgagaccctcattccctcacttccatcccaggatgctctgtctattttcccctcatataattaagcagcaacatttgtcatggaaagattatcagggtgagattatcagccctgttactcaagattttcctccactcccaccaatacttcagaacaattcagcaatcttttctcccatctccaatacagccagtatgagtcagggttatttcccatatttgaaagctaaccaactatatttggagaagaatttactttaagatttcaaggaaacttgagtagatcaataatctgagatgtaactttctatcatgatacctccatcatatgaaaacagtaactttttaattgaagagaaagaatacttactctttgacagtatgtgaaactcacaatgtctgggttctaaaatagagaaacaggtataagagaaagcttccatattcatcaagttgactatgcaggtacaaagtcatagcattctcacaggtgggcaaaggtgtaactgaactttaagtccatggagcagggacacatctgcaaggctggacttttatgcctataccttgttagagagactgttcacaactacacaaatgaataggaggctaaatagaacaaaataagtctgccaagtgtgctcatacacatctgtgttccctacttaggaagcaaaattatcacaaatttaagcctagcccagagaatgtttcaaagctctcctttgcttgccaacccaattgtatctcctgtgccccacctgtacaaaactaaagagtacgaactcatcttcattgctcttatttttatttctcttatttactttattttaatacaggcaggaatgtgtttccttgtggtattttcgcacaaacttgttttggttgacaatctctgcatccattcctctcctctgtctctctgcctctccatttaagtttaaagcattcctcatctccaccctccttccctttcatagcacttgagtcttgttaccccttgcactattcagccttttcacctctcataggtcctgtactttggtatctacacatactcactctaacataaatgtacagatgtaaaacatgaagcctacacctgtgtattacagagaatgcagcacatgtgtctttcttagccttggctacctcaactgacatgttccagatccatccatgtttccacaaacttcataattgcatttgttcttatatccaaataaaatgtccttgtgaatatgtagcacatttttattatccattcatgtgctgttggacagttaagctaattctatcccccttgctactgtgtacagagcaacagtaaacatagatgaataagtgtcacttattcctaagtggtacaatatgggatgtttaaggtacatgtgcagaagtggttcagtggtggtgtcatatggcagtttcctttgtaggtttctgagaaatctgcacactgatttccattgtgcctgcattaaacttccccatacccacaacagcacttggctttgttttcttgataatggccatccttactatatttcttctgtattattactctggatcttgtttagattaaagagcatcattgaacttaatggaaacatagcagtattgttttagattgagtgacaggtatttctaaagaaacacagggagaattgtaggtactggaaactaaccaaccttccctgtcactaagagtactacacaaacacatggagaagtaaagtcactcaaaaactgaggctagaagaatcaagaaatcagggactacttagggactactgtctatgaagaaaataggcctttgaaatgctagttgaacagttatgcctgtatctaactgttttgatgttatgttgtattcctgtttgaaattgccagacatcttcaataatactcaatagaggaatctaaaatggctgaaagacacataagaaagggttcaacatccttagccatcagggaaatgcaaatcaaaacaactctgagataccatcttactcctgtcagaatggctaaaatcacactcaccaaggacagtttatgctggagaggatgtggagaaaggggaacacttctccactgctggtgggagtgccaactcatacagccactttggaaatcagtatggcgactcctcaagaaaatgggaatcagtctaccacagactcagtaattccactcttaggcatatacccaaaagaagcacattcatacaacaaggacatctgttcaatgatgttcatagcagcactatttgcaatagccagaagctagaagtagcctagatgcccctcaaccaaagaatggatagagaaaatgtggtacatttacacaacggagtactactcagtggaaaaaaaacaatggaatcttgaaatttgcaggaaaatggatggaactaaaagaaaccatcctgagtgaggtaacccagtcacaaaaagacaaacatagtatgtactcactcatgtgtggattttagacatagagtctaaatccacacaatccacactgccagagaagttagtaaacaaagtggaccctaggagagacacatatggtcccctggagaaggggaaagggtcaagatcccctgagcaaattgggagcacggaaagaggggggagggagctaagagaatgagaaggggagaagaggagggatgcagaggacatgagggaacagaaaggttgagtcaggcaaagaatagaagataacaagaatggagataccataatagagggggacattttaggtttacagagaaatcaggcactagggaaatgtctggagagctacaaagatgacaccagctaacaatctaagcaacacaggaaaggctaccttaaatgccctcccctgataacaagattgatgactgacttatatgccacctgatagccctcaggcagcagctggtggaagtagaagcagacacccacaactaatcactgaactgaactggaatccagatgcagagaaggacgaatgaagagcaatagggtccagaccaggttggtgaaacccacagaaacagctgacctgaacatcagggagctcttgctccccagactgatagctgggataccagcatgggactgatccagacctcaggaacatgggtttcagtgaggaaacctcagaaatctgtgggacctcctgtagttgttagtacttatccctagcacaggtgtggactttgggatcccattccacatagaggaatactccctgagccaagacacacgaagggaagggcaggccctatcccaaagaatatgatagactctgatgacactctatggtaggcctcaccatccagggtgagcagaaaggatatgtgatatgtagggttttagttagggaagtggtagggaggatgggagggacaagggaactggcattttcatgtaaaacaatcttatttctatttcaaataaaaaatctgcaacaaaataaaataaaaaagaacatcgcacaaactcattaaaaataaatctcttggaattataaccaaagcataagactaaatgataagatgaacctatcttcatttccatgaaaacctcattggagaaaaaaaatcatctctagaaatggtctttaaaaatgtggaagaaatgttacagtaaaatagcaggcctcagaaacaaaaactgaaccagcctcagattcctagttatccctttaaacatactgtattatagatccatgaaaatggtaggctgttttcttctcggcggagccgctgagcagacccaatgtagacctcaatggagtaagaggcccagaccttttttccggatcaatgccaagtgtcaggaactctatcacagggaaggaccctgtctctgctgcaggactccagatccagtgcagtttctcctgccagggacctccctggcttctaacagcctgcgctcagaacatgcgtgcaatggacatctctgaatcctcaccgctaagtctctgcctccagtttaggagaacctctcatattgtcagcctcctcaaccatttcctagacattcagaactcttcagcctcttcaaatatttcctagacattcagtaacctgtattcctagatacatttgtataccattgtgtgaaatgttcatgtgtaacctaactgccccgggatattagtggagtggttaagagtgaaataaaagaatcgtgattgcctatggccagctcgcaaggataatcaggtgtactcgtcagatcgtagccaaagaaactgacaaaggctgtgaagtgattggctatcgtggagacataatcacattctgcttctctgacatcgtgcagagaacccgggatcaccacaccccttctcaccctccaccttccgcggcccctcttggcacaccagcccgaaaccaagtatccccaaccaaggatgcaaagatgtgaccccagacaccatagcaatgagcgctcagcagggacaggactgcaactctgcctgctgacccagcaccacccagcgggactagagcagcatttggctctgcggaagcataaaagactgagctgcccttcattatgaaatatgaagtatgaattatgtaatacaaatcatgaaacatgaaatgtaaactatgaattatgaatcatgaattgtgaatcaagaattatgaattatgaactgtgatatatgaactaataattatgaattatggaacatggattgtgaatatgaattataaaatatgaattatgaattgtgaattatgacatgtggtttatgaaaatgaaatatgaattatgagttatgagctatgaattactaatataaattatgatttatgaaatataaattattaatgtgaaatatgaaatattaacttttattatgaaatttgaaatatgaatatgaattacaaaataggaggaatgtcatgaaatatgaattaggaatatgatatatgaattgcaaaatatgagataaattatgaattataaatatgaaatatgaattatgaatatgtgatgtcaattatgaattatgaaatatcacattttaattatgaatattaattattaattatgaaataggaagtgctacttattaaagtatgaattatgaatatgaaatatgccttatgagttatgaattatgagttacaaaatatgaaatataagataaaatttattaattatgaaatatgaattgtgaatttgaaatatgaattatgagttatgaaatatgaatcatgaatatgacttgtgagatatgaggtatgaggtatgaaatatgaatcatgaatattaattatgaaacatgatgcatgagctatgaattatgcattatgaaatatggattatggtaatgaaatatgaattatgaatatgaatcatgaaatcatgaatcatgaattatgaaatgtgaactaagaattatgaaatataaagtacgaattatgagatgagaattatgaatatgaaatatgaattctgaatttggaatcatgagatgtgattgtggaatgtgaaatataaattgtgaatttaagttataaattatgactcaagaattatgaaatatgaataataaattatgaaatatgaagatgaattacaaaattcaaaaaaagaaaatggtagatcattatatagatataaatatgtctgatgatatggaagaaaagttcaagtttgatggcaacagagcagaaggaattcacctgtgactgaaaatccaatatagaatcagcaaaaactggaaattccatatgcagagccatttgaggcaatgtgtataatctaagaaaatgtgtaccagagacttagagctggatcagctggtgaagtgtttaaccatgcaagaaaaaggacaagaattcacatacccagacttcacagaaaaaggcaggtgtgccaccatgtgcctgtaccccaagactggcagggagagacagagaaaggagcatcctgggacttactggccaacctaggcagcaagttctaggatccgaagaggccctgcctcaaaacctaaagtgaagaggtatagaggtttgattggctctttctcctccatctctcacccatctgcctgtccccatccatataaaatcaactgctccaacataattagacagaacaactaagaatttaccactcactcataattgtataaggtatctctcccttggctgtattaaattaaactcagaaagcttggctccaagccctggattggtcatgaatggacattatctgttatcttcatttaacctgcagttacctgagtcatgttcctctcataatgaagatcaggaagatgaaagtttaatcatgtgacttcaagcctccatgaaagcatagtgtctaaaatccttgaccaaagcaagccatgagaccaaaacagtaccatgaatatccattctagagttaacttaactggaagctccaaatttagagctaaggtgatcacaagctcacagcacttgatgctccacttaaggcaacctgcatagtctaagaaaatgtgcatgaggaggacttcctgatagtaattttatgcaccacaacaaggaaagatctctagaggaaatgaccaagttgcaagcttgatatgtgaggacatctggaactatagtttcagaagactctttgaaagattaagatcaatttcattcaatacagtttatcttcctttgggaaagatcaaggacattttagagtatagaatgtactgtctaaacagcaatgaaagaagaagttgtgttgatcaaattcaatgagcacacagatgataaacactgcaacagactaaggaaagaaagaagatgccctggagcttgtctgtgtgaaacagaacacattgaagtggggatttggtctctggtctcaaaggagaaacagcacttctcaaagaaagaatgtgggcaagtggaatgaatgtgggtggtggtcctgtatacttcagatgacatgaccaagaatcagaactcacacctttgcaattttattatagtaattaattcctatatatgaatgtgacccttggagaagatctgaataggctccagttccaggaagctgtggttccagtttgggagcaataaaaagcatgtgataactactaatatatgtcaaaacatatcatctcaaattattcacttcaagggaaagtaagccaagctctaagcccatttcatatgggaaaactggaacagaagaatttcacttttaccagtaagtgcatgacagaaatatagacattaagcccagttaccagccattgtctgaaatcaccagggacgcacccacaggctcactgccatcatcatcatcaccatcattatcactatcaacattttctgaatcctggaaagtatatccagtgtctaacgtatttgagctcaataaactccaagatgagcaactcaaagttggtgttacttatttcatgagaaaggactgtagtagtactttctcatcaggactatcaacccacacagagacttagtaattaggaaagctcagccttagtttaggctttttcctaactagctcttacaacttgaattgacctgcttctattaatctatactctgccacatggttcagttacctctaccctgtaccatatgtccgacttctttagtgtatcctgatgtctctgcctctcttcttcccagatttctttccctcctgggaaatcccacttattctctccttccactggccatccaaccaatcatagtgacacatcttcacacagtgtaaacaatattccgaaacaaagaagggatttttctaagaccatattatctgtaatttggacaaacagacttcaaactcagaattaacctgatgatggagaagatttaggtttgaagatttaggtttgatctactgaacatttcctgaacatatacgatcccatgaatgcttgcatttgtactgtagttgggattggccataaccaaagacacagatcaagttttaactaaatccagaagtccatataagcatatgaaactaaggtgtttaagaagactaaaatcaaattgagtccccaagaagggcagttgcctttcaccgatagtgtgcttttgttgacagtaaacatcaaggtaaggctatacttggcagctttctctgacagattcaataatatgaaatgtaaatgccacagttaactgaaataaggattctataagtcagtatttggcatttggatagtaaagttatgagggaagtctctccaaaaacctgtatttgatccttgctcaaaagaaaaaactaaaacattttcttggctgctttttttttttcaaatcctgcaagtcttacaagtacacaacaaatttgataattcatataacatgagaaggaattagttgtggttgtgaaatattgactgtttaaccctggcagtgaaaaattaacattcttattccaaagaatacaatgtggaaattgcagaaaagaacaatttttctaagcattcattttaaaagctgtaaacttcagcagggaaacgcattcatgattctgctgatttcctgtttccctagaaacttctttattaaccaaacatttcacaataactataggtagattgcaactcggacttctctattttttccacatttttctttccagtcaatgtgtttctgagtttcaccctagataaactctcctgggcctctccaaaatctgattgttccattcagtgctgctgctaaccaacaactttaatcttcccatagctctactttttttctttcatagatttttcttggtgccaatttttcttggcagtcaataaattatattgccatctaaattgaatatcaaaaatatttttctatggcattttcctattgtatagggtgtcctggacagaaataactttcaacaagtttgtaataaattcttaaggcaaagttcagacttttttcttatcattgtacttctttccacattcaagttataaacagaaagcacaacaaaatggccctagactatgacctcttcaaccatggcttatgaggttgctcatttacaactttatgtattcatcaacactcactcagtgacaaaagatcgatgctcagcttgagctactgtactaaagtatttgtgttattgctcagctgaggcagaggggtgcaactggcctcaggcaagtctgaacatgcagttcaaacattcgggaccctatgagagttccatctatttccactttctctttctgtcacctccctcacccactctgcagagcaaatatttccttttctgtctttttttcaactatgtatccttggctgtcctgactcaatatttaggctatccccaaattcatagagatccccctgcctctttaccctcaagtaatgagatttaaaaaagtatatttgacttttttccaagactacagacatattttatttatatggataatgataatggccattaccaattcttaatttttattcatatactgaggtcccaaacacacagtatgggatatttcatagctatttttatctgttttgtatgggtgctgaaatattatctgctttgtatgggacatgagacattatgattggctagtcctgggttctagttttgaagaacacactggattataggataaccccactatatttgtggaactgaatttgttagattctccagataagcattattgaacatgaataataaatgcttcttacgacattccactgtaagcttctaaatatctatgtgcatttttttactaatgcagaacactgttatactatcactcacaggaagacaatgaaaacattaattaaagggtaatgtcatggtttagacatgatgcttcctccaagacagttcatacaccaaaggactggacccttatgcaagttgtgttcaggagctgattgaagatgagggctttgaattcatcatctgtcaatgaagtcctaacttggtgccattattgagcagagacagagagggtgaagcttagctggatgaagtagttcaatggggtcttgtctttaaagggtaatgcaacctttgttctggcatgcagtgtaaccctcctttgcttcatggttgatgtaagtcaagtattgctgctccaccagcctccagtcaccaagatggcatacctgaccacatgcccacagctctagagccagttgactgagtgaaacccagaaacaatgacccaaattaaatttcggctcctttcagttgctatacctgggtatttcttctcaatatcagaaaaaaattaacaacataggtaagaacacacagcctcaaccaatacagtgtccaacagaatttctagcattgtgtaactactataccctcaccacatttttgatgtgggataagctgaaacagagtcaaatggatagatctcaaaaataagcatcattgtgaattaaaaagtgactacaaggtggttttgctttggctcaaatcaattgctatttcttcttccctgaattaagctgaattaccaacagagctaagaacaacaaaaacaatagacatttattgaaagtgccttattctatatccccaagaacaacataaaacatgcattccaagagcagagagatagagaaccaaagaaaaggatgagccagacaaaaactcaggttcacagtgaatctcattttagagaacaatggggcttggggatatagtaaaatgggtggaacacctgccttgaatgcacgatgaattcaagcctagtatcagggagggaggaaatgatggatgacgaatagatggatagatatgtgtatgtatgtatgaatagatagattgagatagatagatagatagatagatagatagatagatagatagatagatagattgacagacagatagatgaatgagaatattattgagacaaacagagaaatggagaatggctgttgtcatgacagttttctcacatggcaatacggaagtgattagtctcttgaataatcttgagtagtcaggaataggtattttcccttccaagaatatcaacccatgaagaaataatatttagactaccaaccatgaagaaatgatattcagtaagataaaataaagggaacctagtgcctagaactagtgccatccaaacaaaatgagtttttctaaagtaatgaatgctctaaagaaatctgtggccagactgagggaattaggaattctctctgtcagtgcaggcactttgaggcaatggacaattatattatatattaagtattcactgactcctgttctcccaacttaaatttctctgcattataagtctttaatcactatatcccatcaattgacttgatgtttgacaacatttgctcacaactaaagccatagttcttacaggatccagactttaacaaaaagtccttagtatcttgccagtgtgttcaggcattttctcttttaaccttctacaaaagctcatcgatgaaaccatggcccatctgcccttcactccagattagactctagtagatgtggctttgccatgggagggatcaaagcatttatacgaaaggtttaacaaggaacctgcctgcaggagattccccttccatactctggctctgtattttaggtcctgccatagttaccaacttcctccttcttctttcacaagttacaaagtaaaagagaagacataaattttgcagaccctcatagctttgtggtaatcctacccacagatgtcagaaaatactggccccaggaagaaaagggttttaaagttcaatgtttctttttcatgcttgtttcaaattattcaaccatacaaagaaaaacttaaaagattttctgacactaacagttagatttggaggattcatatttcagaaccctgatctaaatcaagtatggcaggctattttaatatgtttcttattttgttaaaataaagaaccaagaatcttcatatgcagagatagaagaatccttgaagtccctagcagtttaggtaatcctgaactaaacttatcaccatcaatgtttcttcacaaccacccaccataagttgccaagaaggtaaacacatttcttcccactaatatagaaaactgtaagttaaaccatcacctgcaaaaaaatacaacaatataatatcaagtagtttgtaatattagggtttatatatgaagttgctccatgatagtttggaaggattggttcttcatgaaacctgtgttcagatgtttggatttttgcaaggtattggatgataagactttggcatcatcatctatagatggattcctaatttgttgtaatagttggacagtgccagagacattgggaagtaggaattgattgaagaagtagatcaatgggcccacaccctggagtagaccactcacatccatgtgagaacatctaccaccactttaacaaacctgttacttgcaacccctacacctgtcaatgtattattgtttctacaggatgagaacacaactccaagatctaaataacaaagggtgctttgtgctttctatacttaaaattcagcacagacaactgtaggccaaagtttgaaattcgtttttcaaaatcatttctgtctttgtctttggtctgtctctgtctctctctgtctctgtgtgtgttccactctctgtctgtctgtctttgtctctctgtctctctttgtctatctgtctgtctgtctgtctgtctgtctgtctgtctctctctctctctctatctctctctctgtttgtgtgtgtgtgtgtgtgtgtgtgtgtgtgtgtgtctgccctgctctccctcctccctgcctcccatcacttggcttgatgtttcattctctgtgcaggaggattttcttcattatgctcaggaaaagatccatcaatgattccaagtttttgatgatcattctcagcagctgcagcaagactcccttcttaaatgaaaaaaaaatacattttagccctgaggaatgatattcatacctcacattggcagacagacaaatgttcccctcaaaagatgcaacattcaccatactctgaacataagctcttacatggcaaagggtgtctgcaaatgtgtggttaaggattgtgatatgtggaaatcatcctgaattagattgagagattcagtataaatctgtgatcagagagatattgatttggttcagttgctcagttcacagcaccataagaataaacagtaatgtcaacgacaacaaaaataaggtaagtgagccaggtgttggtggcacacgcctttaatcccagcactcgggaggcaggtggacctttgtgagttccaggccagcctggtctccagagcgagtcccaggataggctccaaagttacacagagaaatcctgtcatgaaaaaccaaaaaaaaaaaagtgaggtaagtgagaaagacagattagtatatcagagtgatggaaaaattataaagatgtattgccttttaacccaagctaagatgcagggtgttcttttttaatatattttcatatatttgaattacaaacaagattgaattacatcatgatcccagttcccttctccctcccttcctcctctaccccccccccccgaactaaaatcctacctgtcatatgtcttttcttctattctacacctgactcaaaatttctgcttcctcatgacctctgcatccttcctttttttcccttctctctcatagcttgctcccctgtcttcccatgttctcaatttgctcaggtgatggtgacactttccccttctccaggggacaaagtttgagtattttagggtcttctttgtttactagtatctctggcagtgtggattgtaggctggcaatcccttactctatgtctaaagtctacatatgagtgattaaatatctcgtttgtctttttgtgattgggttacctccatcagaatggtttcttcgagttccattcattttcatgcaaatttcaagatttcattgtttttttctgctgagtagtactccattgggtaaatgtaccacattttctctattcttctattgaggggcatctagactgttttcaggttctggctattgcaaataatgctgctatgaacatggttcaacatatgtccttgttgtatgaatgcgcttcttttgggtatatgcctaggagtggaactgctggatcttgtggtagactgattccattttcttgaggagtcaccatactgatttccaaagtgtctgtatgagttggcactcccaccagcagtagaggagtgttcctctttctccgaatcctctccagcataaactgtcattggtgtttttgattttagcaattgtgacaggagtaagatggtatctcagagttgttttgatttgcatttccctgatggctaaggatgttgaacaatttcttatgtgtctttcaaccattttagattgcactattgagaattgtctatttagttctgtacccccacttttaaattggattgtttggtgttttggagactagcttcttgagttcttggtatattttggagatcagccctctgtcagatgtggggttgatgaatatcttttcccagtctgtgagctgtcgttttgtcttgctatgtcctttgctttacagaagcttctcagtttcaggaggtcccatttattaattgttaatctcagtgtctgtgctactggtgttatgctcaggaagcggtctcctgtaccaatttattcaagggtatttcccactttatcttctagtaggttcagtgtggctgggtttatgttgaggtctttgatccactttgacttaagtttgtgcagggcaaaaggcttgtgtctatctgtagtcttctacttatttacatccagttatgccagcacaatttgttgaagaagttctctttgttccagcgtatatgtttggattgtttgtcaaaaatcagatgttcataggtgtgtgtgttaatatgagggttttaaactctattccattggtctacctgtctatttttgtgccaataccaagctgttttcaggactatagctctgcaatagagcttaaagttaggaatggtgattcctccagaagttcctctattgcacagggttgttttggctatcctgggtcttttgtttctccatatagagatgagaattgttcattcaaggtcagttaagaattttgttgggattttgatgaggatttcattgaatctgtagattgcttttggcnnnnnnnnnnnnnnnnnnnnnnnnnnnnnnnnnnnnnnnnncctatccaagagcatgggagatctttccattttctggtatcttctttaatttctttctttagagactcaaaattcttatggtacaggtctttcacttttttggttagtgttactccaaggtattttatgttgtttttggaaattgtaaagggtgatgcttctctgatttctttctccaccaatgtgccatccgtatatagtagggctacagatttctttgagttaatcttgtatcctgccactttgctgaaggtgtttatcagctgtaggagttccctggttaaattttttgggtcacttatgtagtctatcatatcgtctgcaaatagtgagagtttgacttcttcctttccaatttgtattcccttgatctccttttgttgtcttattgccctagctagaacttcaaggacaatattgaagagttatggagagagtggacagccttgtcttgtccttgattttagaggaattgcattgagtttctctccatttaatttgatgttggctgttggcttgctgtatattgcttttattatgttgaggtatattcctgttatccctgatttctccaggacctttatcataaaggggtgttggattttgccaaaggctttttttggcatctagtgagatgatcatggatttttttcctcagtctgtttatatggtgaattacattaatggattttggtatgtttaaccatccttgcatccctgggatgaagcctactttatcgggatggatgatttctctgatgtgttcttggattcgatatgccaatgagaatttttgcatcaaggttcatgagggatactggtctgtagttctatttcttagttgtgtctttgcatggcttgggtatcaaggttactgaagcctcataaaaagagtttggtaatgacccttctgcttctattgtttggaattctttgaggagattgatattagctgtactttgaatttctggtagaattctgcactgaagccatctggccctgggttttattggttgggagacttctaatgactgcttcaatttcattagaggttataagtctatttaagttgcttatctgttcttgatttaattttggtaagtgaaatctgtccagaaaattgtccatttcctttagatttttgtgggggaccgattattgggccccaggttctgtctgtcagcagcagtggtgccaggaaactcctggccactattgtattgctagtttgaccttatttttggttcagtctatttggtgttctataggcttcttgaattttcattggtatgtctttctttaggttgggaaagttttcttctatgattttgttgaatatgttttctgcacctttcagttggatttcttcaccttcttctatacctattattcttaggtttggttttttcatggtatcccatatttcctggatattttgtaatagggatttgttggacttaagattttctttggttgatgaatctatttccactagtgtgtcttcaactcctaagattctctcttccatctcttgtattctgttggttatgcttacatctgtagttcctgatcgtttactcagcttttctatttccagcattccctcagattgtgctttctttattgtctgtatttcagtttttaggtcttgaactgtttccttgagagatttattgatatcttgtattttttggttagttttttcttccatttgagggactttctcatgtcctctttgaggtactctatcattttcatgaagatgcttttaagtcattctcttctgattcatctgcatcatgatttttaggtcttactggtgtatggttcctagtctccagtggtgtcatattctgttttctgttgtgttctgatgtgtttttacctagtccttttctcatcctttcttctggtggttgtagcaagagtttcttgttctcctgatgggtgtgggaccaaggttcttttctggtagatgcaaacagatccaatactctgatgtcggtctttttctcttggatggaggtgtcactgttaccctggtgtcggcagtgttcgggtgtgccggtcccgccaggccagcagttcgaggcagaactgtcccgggccttggtgtgtcggattctgcctctgaactcaatccggcaagcaggtcgtttgtgacagatgactctgagcagcaacgactaacaggaactggaaacagttcctggcctacctgggcgggtggatggagtccgggctgcctctgggtgtttggaacctgccgatgccgaactcagtccggcaggcaggtcacttgtcctgggtgttctttcagatagaaggcagacaggagataggctgttgagaaattgaccaagaatcccagatctgacccaaaaaagggtaaacaacttcttgttcaactagatctaagcaaatgatggatctggaaagaaatatgttaaggtaagatcagaatgatataaaagagcagaaacgcagctcccatgggcccagcattcattgggcagacccctcatctctgtgcatacacataccttcagtttagtaaaccacacttggtgcttctttctttacatcttattgaagttgtttggagagcacaggaatcaatagcatcccctaacaagaggaccagaaaaagtccttcagtttacactgccaacagccagtggagaagtccagactaactccacattgcattataatcgtgatgtcatttaaaccgttacgtttgcttattactttcacagtccttttctttttaattttttcagaactttatacatgagtattgtatttatatcatttctattcctcattctctgctcttcacttcctcccaaattcatgatctcttcattatcattgttatgatacatcacgtatatgtgtatgtcacatacacacacacacacacacacacacacacacacacacacacacacaaacacatgagctagtagtgctcaggaaggaggcttccaggtcagttctagatagatttccccaagcttagacttctcctattctaggaattagggaatgtgaatttaaattacattagaatttcatcaaactcctcatgaaaatagctaatatcgagaaaacaactgacagaaaatgctggcacagattgagggaggtggaactcattcttggtgggatcctgagagtcattaagaggtgccttgatggagaaagcagtacacagttgtgaatgtctaactggaaaacttcgaaagaatcgtcatcactagtacagagcttatgctgtcataggactaacagaagtcagttaggtctagtacctcattaacagtctccacaaatcacttttatagccaacctatatccagtgtgatactacaaaatgccatttagaaagacaagtcttgactcccttatattgcagcctagcattgcagacactggcaagattaatttttactcatgctgaaatgagtgcaagcaaaactctaaaagccacttcaccaatagctgactcttccaggcaatgggaatgcctgcagacatcccaagttcatatcactggtacaatcaaagctctaaaaagattgcagcatagcagaagctacctggttattaagagataactacataaggaaatgaattcttagttctgaatttaaggaaaagaggaagccttctggtttactttgattgtatattaatttcttataataaagccacctgtgggagtgaactgaaagagtacactgatgtgtttccttctctgcaaagtagaaaataagaattctacatgtgatctgcttaatggggatgtgttcccactgatcttattactgtttaaagaaggcagggtgactttgcattctcaagagcagtgatgggacctgttagtgttcttttatggatatcacagtctataacccaacaggtgttaggaagaattcaccctgtgctgaagccccacaattactcatccaccactaatacttgcattgaaatgtaaaattcacagtcaaatctaaacaatgcaataaaacaagaatttagttgtcttcctgggtaaaaccattcccagcttaagtggtttggaattctctaaggaagacatttttaacagttcatttgcaatctcaacccagccatttcctgtatggaaccaaaataaattttatctgaactagtccctcttattgacagataaagctggcccaaagagcctctgcctatggtgaattaaactggcttgatgtgttaattttaacataaccagagagtatagcctgagactaagctcatacatggagtaaaaagaaacaaactgattctaggagctcagaagaaaatggactattaacctgagagaaagaatgagtttgggaaggccaaatgttccagtaaatggttgggacttgtacttttttgatatttaggcacctaatgtaggcatcagatctgctgctgataatgaagcattagactgaagaaccagtacaaactggcatttctctacctcgggatcattttaaggatgctctttgatgccacccaggcatcacagccctaatgatgcaaaggaccagcctttgcatgatgtcatcaggtacaaggtagaacaagataccaataaataccaccaagaactaaaaagacatctctcatttgctttataaattccccattaacgaccccaaaacttcatattgctatgaaccccagatgtaagaaagtaattgtaacaatacagagatattttttcaccacattagcaaatgggacttgagacccaaatacaagctaattttgaagagtaaactatttttcctcattttttcctcaatcattgggaggaattttttgcttgcatcccattgagatcttacttaagattactggaaatcattttaataattatggtgtcattatctattaaaactcaaatagttgagcttatctgtttttaaaacatagcccaaaccctgttgggaaacaaaaaggagacaggtacataatgttaacagcatgctaacagtaaagaagaacaacattatgaacagaggcactggcccatgctgtgacacgatttaaagacaggctttataagtgatcaaaaaaacccactgtgggtagaaattgagtggcagagggttcaaaaaggaaaagacaaaagcacaccagagaggattgttttcaagtcctatttgtcaagctctgatcttctaagagacattttcttgcagaaggaagaggagaaggataaagaagagacagagggggcacttggtggcaagcttagatgtacagcaacactgctatgtcctaaatatgaatataaactcagacatgatctattatttaaacataaaaagttgtgcatcttaaacttgtaacagaaacagtgaactcaaggaagatgatatagagatggaatcaaattccacagacaccaattttaaaaggcaactgaatcttggaaatacccatttcccagaagatatatctgcaatttttgttcaaaggccaagctgttagcacatcatacttagaacctcatgactcagagtattacagcacatggagtgtaggactgaattgctcagttacctaaggatcatagatccagcttcttctgtcatggtgaaaaccacaaagcaatacaaatcagtttcttgaatctccatccaaatgaaaaattaaaacctgtctacactcaaccaaagctcaaggttgactgaggaaattttggcagcaaaacatacatattgcttatccaaaagaaaagaagggaggtgtgtttggaagccatgggccatgtcttgccaattctgccagatggtaaggacacaggcagtaagaagccatggatgctctgactctccttgtacagactccccaacagctcactgcacagcagagtaaacttggagccatggcaagtcaggtgaccccttcatttactattgctgttatacctcgaaaacacacagcacaggctgagtacatgcaagagtggagccaccagaggccgggctggcaatgctacttgaaatgcttagttctctgctttcaaagtaccagatgagcatggcatactaactacagtgttgcagggaaaatgcacattgacaacagaagatgttgatgacacacttctaggtttctttgtttggagcagttataagctgtctctggagctcagagacaaacaatttagtgatgaagacacaatgctgatggaggacttaaaagtcagtcttctaacttctctaaaaaaacagctgcctgctactccccaatattccttttgcagaattcccctgcccatctcactccttcctataggagtcaatccccacacccagacttctggggcctcttccaccttaagtgtagccatcttatcaccctgtataaggttttttctgattaatatccatgtgtcatgaatgaagatagcatgtttaaattggtagtttatgcctattagctgtgcaaatgttcgatgccaacacattatgcctgacattcctatcttcctctgtggttggtactgcctttggtgaactggatatgagtcgagcattgcaaaacacaagcagagccataattatgtttgcaagaagagtttctataagatagcaacagcaagccttcttaagccagaagctgactgggatgaaaaaagcatttgagctttgaaaatgacagtggttgccagtgctaataaataaaatagaagagccctgtggaaccagcttttctctgtggaatccttatttataattaagacaaagctgatgacacagaaaagcttgaggaacaactcaagaaaaatatttatgttgctagctgatcattgctaaatcctggcttagtagaatcttccagaaaagaagaaaaagtatttctcagagcttgtaacactggtataccatgcactgtctagctaaactctggtaaaggtaaagtcaaacagagcagtggacttctggaagacaaaacctgtgtgagataaatgttttccaagccagtgcagacttgagtaggcagctttgggacaatctctgtacatcgtgcaacgggtgcatctctgtgtggttatctagttcagcaatgaaaattattgggaatcttgaggtgtaattacttttctgaatgagatactaatgctaagtggtatcaatttaatctaatggaatagaccaattccaagaccactatggctaatttgccagcttgatagcatttagaatcaatttgtagaaaagtctcttggatggctgtgagggacattctagattaggttaacaggaaatgggaagacacactgttactgctgtaaatagaaagaagagtgaagcactatggttcatcactctcccttcctgccttcaatacaatatgaccatctacctcaagttcccatagtcatagctctcccaccatgactgactatatcctggagatatgagctaaaataaagccgtccttccttcctacctttcttaaattgcttttgttggagcattttgttatagcaaatataagaagtatttgtgagtgttttgtcaatgcatttaattgtaccaaaattagtaaatagtcaactcagtagtatactcatgaattgttggtatggatagtccaagtagctcttaaaacaatatatgtttttgctctaggttgcctcctgaggaaggcaatccctattgttgaagacaccacagtcttaggatatgggactaagatgattcaagctggatccacagtaacaggaattgctatgcaagtgccacagggagggaatcagtcattagtgccatcaagctgcaatgcctatgaactgcaacagtgaccagaatagcaagatatccttaaatatgtgacagtggcattcatatcctggtggtagcaaagaactgtccaaataaggcctactcaatgacagggaaatgaagtcatgtctggtactagaaatacagccaactacccaatgctagagatgtattggatattagaagaaaaactcctaccaacactttactagatgaacatagctcaatcctaaaaccctcataccacagataagtgtagctactgcccctcatcaaaaagaactgttctttattaccaatggagacattaaagaaaaccacaactggacacaatgcagaggtcaaaggattattggtagcccagccacaatggatacttctgtatcataactactgcacataaggctcgaagaacatactggaagaggaggcagaaagattgtatgaggtagatgaccaggtaatctgatctgagatttttttctcctataaatggcttcctaaacaagacccaaacaataacaatatcaatagacattaatgaagaaggtaaaaacatctcagagtgccacccttcatcacagtactataggcaacaattgacttctgagagagagagagagagagagagagagagagagagagagagagagagagaattaacctctcctaggaatggagctcctaatttgttatccaataccaagtggttagtcctgaaattatatacatatcaacgataaaaatggactaatcgtgttgcatctgtacattgtgtaacaataatcatctagcagtagtaatcaaagaaaaggagaccataaatttgagaagtgagtggggtacatgggaggagtgtgaggaaagggaatatggaaggagagggaaagggactggtgatacaatcatattttaagttcaaatatattaaaagaaaaaactgtgatacatacatagatgcataaataaatttgagagtgtctatttaatcaaaaacatcatgaaaaaggaagaactcaaaacaagaggttcatagttccactcaacagtggccagggagctattacagagaaagcatggagtcgccccatgcctcagagccgagcacctgcctggcttggctataaaatgatgggtatttctctcattggagcatggtctgatcatctggctgcctgtgaatagctgtgctcagatgttcttgaattaccaaaccctggctgttcactacaaaaagtatactcgtatgtgcagttcaagtttgtccattctgtgaggctgtgacatttttatgtagaaacttaacatataaaaggcctcacactaatcacctgcttagaactaaacacaacaacattaaaacagagtgtttaatagagacaaaattgacacacacacacacacacacacacacacacacacacacacacagtgaatccaaagaggccatgaagaaaaaagacatcacccatgtactgaggccagcacttcagacagagacagtacgcactaaagaaagttacctctttggggctatgcactcataaagagaaccctaagccaagactgtaaagattaagaaatactaattggacatggataaactaaagatggataacgcagaaaacccaacctaatttctcaagaatttcaactctctagagtctctcttagaaatgtgaagcaagatacagtaactgtagcacaggatgcaaagccagtttgggtagaggatggggaagatggtcctctttaccactatcagcttaaggatcacagcaagctattccatgtcaacctcctgcagggaagaaatgagtcctcagagaagcaaggggcaaataattttagcgaatttaatgaaaatgagataaaggagtcatagcgggaaattccatcttaattaatttttcttacactttctcagcccaagccattctatgatcacacaggaaatcccaccaaaggctttcaatttacttaattcttgaaggcaagacttttaaaatactcagggagaatatcaacatcagaaacactggcttcactgtgggagcagctgcttggggaatgatgtgcaggggctcatgagtcacatttgtaaaaagatgtcaagtgaagaaaaatgtaagagtacagaaaaatgccgatgataatttgtggaggggttgttttatttatttatttcttcatctctgctttagaatcaaagactgagatatattggatcctgctcatttccaataagtggccacaggtccataatctaagtggccacagtccataatccaccctccctgttctagggacaaggtagaatgtgttagaatcaaaaataagaatcaaatggactttgggagcccattccacatggagggatactccctgaaccttgacacatgggggtgggtctaggccctatctcaaaggatattacagacacagaagatcccctatggaaagcctcaccctccctggggagcagaaaggatatgggataggtagggtgttagttgagggagtggtaggggaggaggggattgacatgtaaaacaatcttgtttctaattcaaataaaaatagagaaaaaaagaatcaatgaaggtatccatgggcccacctggtgccactgggctcaggcacatgaaagacacacaggccagcctaggttctcatggtcctgatgatgccaggtgggtaggtgtcattaggatgagcaaatatatattggagaaatgggagagaaagagaaacatggactctgaaaagaagcagatctgaagaagcaagagtggtaagaaataagctgatgtgagtagcctactggccacctggggccagggtgatgcccaggcctgagctgttggcaaaggaccatgtctagctccattgccctggattagccagggtatgagttgatgtccatgcctcctgttaccattgagggctgtgaggatgcctagggtctggtcagccacctgagaccatattgatatcctagagtcttgctgccactggagccatacacatctgggtggcctgtgctgccaccagacccatatggtgtttagtcctaagttgctgctgagggccacgtctgggtccatgttcctgttgtaattgggggtctgtgttgatgtgcatatcccatgttacctcaggaggccagaagaaccatgtatgttgaaatccaagggccttgctgaccccccaaagcaccccaagggacttgtcctgcagaatggtaactgcaggatctccataacatggggtaacagcaggatgtctgagaggagtttcagtgagggtctagtgatgatggtgtgccccaggccttgaaccaggccaatggctcattgccatgaacatttgtgggtggggctgattgtacaaagtataacacactccagctccaaatgctggatatatgagaaagacacaggagcgagatggttttgtttgtttttaattaattttgtattaagggattctttgtggggagacactgtagaggtgagggggatatggagggactgggaggtgagcaggattggggttcatgatgtgaaattgccaaagaatcagtagtaagttatgttaaaaaaaaaaaaaagaattcactagcagcaacttaggactaaacatcacatggccccagtggcagcaaggctctaggatatcaacatggtctcaggtggctgaccagactctagtgaattcacacatggggttagggagtcccattcctgccatcaaaccttagcggttatttggcttgacttgggtgtgggctgggttttagtttaatttttgagactatgtacattttattggcctgagcatgcctaagctgacctagaacccatgatcctcctgtctttgcctcccggttactgttattactggtgtgtgcaccatcacacgtaggacttatcatcaaatcgtttttgagagatggtaactcaacttgatatagaacctgattcaagtatatgtcagtgaaagatgagctaaaatcataagaaataaaaacttatgttcacaggaccatgagggaagaaagaattccatgtggggtctggttaatgctgaaacaaaccaggtcttaagagattcatggaaatttctaacaagtcactgcaatcaatgggggaaaggttttttgttaaggaaagctctccttcttgctaggaaggagagagactgaggtggctctgtgtagtatcatgacagcttgggtggtcataaggccatatatgttacacacctgtataatcactaaaggctgaaaatgactttccttcatttcacacacacacatatgtcagtactacctcagacaacaggagacctactttagtgaaaaatggggaatgagaaacaaatgttgtctgatttgaactatcgaaagataagtggtatttctttcccaggtcttgaggcaaataattccattcccagtgtgaattaatgcttgccttttaaacaacagtaaggtttatctcaaaatctactggaagatgacctttattgactttatatattctttgttcaacaaatgactttaagcagagtatattccagatacttggtagcaggcataaaagtgtaagcaaggtctggctgtgttcttgccttgtatgaggctgcattagactgggtggcaccagattgtaacagcagtgcttatgaggtcagagtgggaggatcaaagggaaattcaagggcatcctcagcttcaaaggaaatcggaagccagtctagaacatgtgaaacacaaattataaaacaggaggacttgttatgtgaccttgagacactttcctctttacctttcagtcattggtgtgctagcttccggtttttgttttctcagactctctctgattcccactctcttgctgataaagttgaatgcttcctatagtttgtatcagtcccaaaaccaataataattaaaccaaagtccaacgcagctgattctctagtctttcaagattcaataaatggtcacaaagagtctgtttgatgagtagcagtatttaggcatatgatgcagacactaagaagtgcaaaactccttcacagcatggggcctctactagagtttagtatagtataagttgtttaaaactgaataactaaaatagaagagtatccgatgatggtaagtcttacaaagaacaaagtcaagggttgacattttaataggtgaggtgttaaggttgttgatcttcttttgaaggtcacatttgagaaatgatatcaaaaatagaaaacatactgtttactgaacttgtgatattcaaactttaattacattgttcctcatcttgttatttttttctctccagtcacctgaaatatcatactaaacaaaaatatttgtcttaaaatatttattagcagcatagtaaatactttttattattctcagtaccagactctttaaaaagctagcattattgcctgtatggagtcattttcggaagtaggagacaggcactgggtccattgttggaccataaatggcacatacagacccaaattcaggtatttctcagtctacagctgtgatcacatgaagggaaactgaaactttgacacatgggaaatctgtttttgttgtttccttttagttttggtttttagagtcagggtttctctgtgaacagccctagcatcctggaactcactttgtggaccaggctggcctggaactcagattaaaggcatgtgccaccatgcccagctgacacacatggaaaatattaacaagtctcacattttttgtttcccaaaataggatgtgctagctaagtaatgaaatggtaagcagtgtttcagaattgatgttataaaaatgagtaaacatggggagatgagcagggccatggtgcctgggaggtttccacttgagcaagatggcagtggatgctgtttcaataccctctgtaagagaggccctcacttctagatggagggggtttgtaatccttgaagagtgctggtccataaaggaattcctggggcctaaatgcatgtgagttaagagatagtgacgggctgaacaccctctgcattcttttgtgggtttgttttacataagcagcatttgtttcggccattaacttgacagacttgacacttctttatataaatatattttgctcactaaaccataaaagagaaatcagtgatttctagacctagtttataagtacagaaaatctgaaatggaaattaaataaaaccccccagttgtaatcaattcacacattgtagaaggagtgattatactctttttaataaccacaggaactaagacctctgacactaagttccttttcccaatcacagtgcagggatcacctgtgagtttagctcccagtgcctgtgctctggacatctgcacccagcatagaatacaggtttcattttctctgaacactcttaatgttgagtttcattggcagattttatttaaccttgggactacagtattttcaatctgttgttcaacccctttacaaaacccacactgttgaaaccacccagtttattacattaactgtttcatttgtcacaagagccaagatatgaaataaacctagaaatctatcaactgatgactgaataagaaaatatgagacgtgtgtgtgagattttacacagccataaagaagaacaaatgacagtatttgcagaacaatggatgaaactagagaaaccatgctaattgaagtaagccagactcataaatacaattattgaatatttgttctcagagtcaggaaatagatttatatttacatatggctgtactatatgtgcttaggttggaaggtaagagaagatgatatgtgacatcacaacagagtcagggattattttagatgaatgagaccagaaagagggagacaaaagggacagtgcagggggagtgggtcaataagaacaaagtatactgatatatatagatatatatatctatatatatatagagagagagatatagatatatataaagaaaatattacaatgacagcttcagctactttgcttactgactaaaaataaatgctttaaatagtagactatgaagaagacctatgaccaattatcagcttgtttccttaagtgttaggaagctaaagaagtaataaaatatatcagtatctcaaaatgaagaatcttaatactacaatctgcccttcactccaacccttttctcacctgtaagcttaatgtgtctcacagtggtcctgtccctttaggaccctctacactgtatatccctcttcatttgtgtccccacacagctctcatgttccacaccttcccacaccaacctaggactacaacctactgatctgggactagaattcaaagacccttctccaatgctcacacacctgtcagtctcagtcaccatcaggggtgtatgatatcactacagtgttcctgaaccccctctaagaataaggaaagtggtagtcagcctgttcctctggagtgttgttattggctcctgagtacctatcaacttgtaaaaatgaaatgctagcgagcattaagtgtgacacttttgtgaatgagaattcctggaaagatgctgtgtctgcaaatgatgactgtctagagtctgagagataaagaaaaggtgggaatggttcatgtccagagtccaaatacactttatcttggtctatctttagctccctaagtagccattccctgacctctcctgtgacaggcctagtatacagtcactaacaaatttaattttaaaaagctgacttttggaatgacttaacaaactctactttccactaatcatttggctaagaaggcatctgagacctatagctgagatttctctacatggctgtaacctgcctcgctgatatttccaccaatgtatttgattaatgattttcttcgttttattactataaaaacttcatgaaattgctttcaaactgaaacatgatatttagagtaacctaaatctgtgtacccgggccatggtgactcatgtttcactccaaaataaactatctctgatgccttctgaagtaggaattttcataggcatacataccattttaaaaatagccaaacacagggctgatccagacctctgtatgtagatgccaatgaagaggcctcggcactctatgggtcccctggtagtggataagtatttatccctggtgtaagaagggactttggaagcccatcccacatggagggatgctgtctcagcctggacacatgggggaggacctagtccctgccctggatgatatgacagactttaggggaacccctttggagggtaagcagagggggaatgatgtgggggctggtgggaggttggggaaaggggagatagagggagaagggattgacaggtgaaggaagcttgtttctaatttgaactaataaaaaaaatagtcaaaatgtcctaaaagggagctccaaagaactgagaacaccctccatccacacacagaggctatgaaactttacagggaagacatcagtatctacctccctcctcatccctaacaactttctagtcaagggttcaagacttgatgattaacaagatgagtctgtctgtagataatgtgtagaatgggaaatgtctaaaagggatactttggtctttcttctgatttgctaggtcattagtttctcacttgatgcaagcatataaatgagagttactgtacaaaaacatgatggaaatgctattttctcagaaacaaatatattagttcagaacacactggagggaaaaggcaaataacacatggcaatcttatgatatcacaatttaaacatatagaagaaaataatccaaacaactcttccacctcccaccccaacaagtagaaatgattgcagaaactgcaaagaaaaaaacaccagattgtgtggccataaaatgtaaaaggaaacaaggccccaaatctcattgccctccatgactttcctctgaggaaacctcacacttaagtccacaagtaactccctatttacagaggcaaagtaccccctccccagaagcaacttgcatgtcctgatagcagacaaagcaacatactcgactgtggttgccacttaagcttgtctcagtcaccagtaccagtacaggacttgctggaccactttcttttactttcacttcttctctttccnnnnnnnnnnnnnnnnnnnnnnnnnnnnnnnnnnnnnnnnnnnnnnnnnnnnnnnnnnnnnnnnnnnnnnnnngaatcactctacttgtttctgttacctgaataaacatttctgagataaactttccaactgaagatgaaaattctttgctcagtgagagactgaccattgagtatcctgtcttttaatcctacatgttactgttcttcttaaaactcccccaatccattaagccttcaagtgcaagctatactgagacacccaacccctttgaaactcttaaataggaaatacaattcttccatgtacttacaaagctgccactgtgtcatgaaagccaaaacccctcttacagtttaaggtctcttagctccatatccattgactacaataccacctagcctcttacaaaggaaaatggatgcagatagtacaaaatataagagcaatagatatttattccagattccctactatttctaacccaaataacatctggcttctagacaaaccaataccattctcattataataataaatttctgttccttcttttcccctttacacagatgtactctagttttcctttcctatggaaatcaatagtaatgtcatggttcaagggttgactgaagtccctacttatttcccttgggccctaaatatgaatcagaaaagtttaacctcctgaaatctttgtccaatacatagattacttgcctccctgctcaccttgtgttggcacttgtttgtgtgaatctgatatttattacaagctcttgactataatggatgtaagttttccaagaacaaatgcagttgtgaatgccccaaagaagttacctggggcacaatgcctcctgtggaggggatattctactctctagatgaacacaaactgacaaaggcttacagatttggctggctaatgtcacacctggaccctagattattccattattactctcatttctacagtttaaccagagaaaacaccttcaagaccatagtttagagttgctttttgtctgcattccaaaatctcaagcccactctatcatctttctacattcctgtgatgggggatgtccatctgtatatatgtttctcttattggttgatgaataaaacactgtttaaccaacagaggaaggaagacaggcaggataggagatgaggagaattctgggaaaggtaggcagagaggcaccgctagaggcgtcatatagaggaggatagagcaagaggttcagacccttctctgttaagataagaccatgtggaaatatatagactaatataaatgggttaataattaagacagagctagccaataagaagccctagaaatctgccaacagttttataattaatatagccaaccatgtgtttctttggggctgagaggggttgtgagaactacctagacaagaaaactccagcaacattcttggactatctgatcatatcctgcatttctccctctgctctttatgaacacaagggaaagattgcttacataccttcatccaaaaccaaaactgaacccaaagtcttattagatgctttgtcctcccattccaacatatgataaggcatttcccctttactttagttgctgctgctggctacttggttttgaccactgtggttgagctctgagttctacattcagcttctatgctccatgcagttcatactctactgcttattgaaaatgctcaatatgtttactcttctgcatacaagctctatgggatccacgtaacttcccctgtccatgctcatcatttctatccaaaccttcaccctctattctttcttcttctaactaaatggagaggagaggggaggaaagagaaggggagagaaggggagaggaagggagatgggaggagggtagaggagaggagaggatggaaggggaggggagaggagaggagaggggaggggaggggaagagaagagaagagaagagaagagaagagaagagaagagaagagaagagaagaagatccaattctccctttgctggtaaggcctgacaatgacattccagtttcccagacttgggcccatgactgggagctacttttaaaagcacttctcatgattgtttcaatgagtttagatagatttgattcctacagccagttaagcacaggaaaataagaaacatttcctattcaaataaatggtagaggcttgcccttccctcaaagaaactcttattagaatgaccctatcatcagcttgtttgctcctccctataaaataatctaaggtgaagccaccctgctgagatactctgatatttggtcagtctgatctcagttatttgcctccttacaaaaaatctggacaaaataagtcaccatacatgtatggttttaacggtgatagttgtaaataagaaaatttgatcaatataatcaagcagtataggtggccatgcccattattagcacagctgcacttccttcactttccgctgaccgatccacaactacgtgagtgagcccatgctcttacccaactccagtccaaagcatcattcacccagatctccccaggcttgtgcctgcttggagtagacatgcccaggcagggaggagctccctgaatctgggaacagtccactctaccttccctttccgccgaccgatccccaacaaggtgagtgatccattgctcttaccaactcccttccaaagccccatacaccccgatctccctgggcctgctcctgcttggggtagacgtgcccaggcagtgaggaactccctgagcctggaaacaccccagtcttacttcctgcccccccacacacacactgacccctatggaggcctaactccttcagagtgaggagactaccaagagaggcaagaccatcgagagctgtgcacattgaattcctggcccccacacaccactggataacaagaggagatagagagaccccatctgcactcactggaaaaagatatgggaagaagacagaataagaactcactcaacaacagaaagaccaatatgacaccaccagaatctagggactccactccagcaacatctgaaaagcccaacagagtgcatgaagaagagatgacctcaaaaattatctcaggaagatgatagagacctttaaagaagaaacaagaaaatcccttaaagaaatagaagaaaaagcaagcaaaaaattacacgaaatagaggaaaagacaaaccaaaaaattcaagaaataaacaaatctcttaaagaagctaaagaaacccaagataaaacaaccaaacaagtgagggaagcactttaaacagttcaaagcatgaaagctgaatcagacacaataaagaaaacacagaatgaggtgatgctcaaaatggaaagactggataaacgatcaggaactaaagacatgagtataactccaagagacagaaaagagaatctcatctattaaagactggctagaggatatacattcatcaaccaaacaaaacctcaagtccaacaaattcctaacacaaaatatccaggaaatatgggacactgtgaaaagaccaaacctaagaataataggtatagaagaaggtgaagaaacactgctcaaaggtacagaaaacaaattcaataaaatcatagaagaaaacttccccaacctacagaaagatatgcctatgaaactacaagaagcttataggacaccatacagactggaccacaaaaagaagtccccccgacacataataatcaaaactccaaatctacagaataaagaaaaaatattcttttccaatcaaatgggctcaagaaacaagctggtgcagcaatcctgatatctaacaaattagtcttcaaactaaaatcaatcaaaagagatgaagaaggaaatttcatactcatcacaggaaagtccatcaagatggagtctcaatcctaaacatctatgccccaaatacgaaggcactcacatttgtaaaagaaacattactaaagctcaaaccacacataaaacaacacacacacttatagtaggagactttaacaccccccttatgccactatacaggaccaccagacagaaacttaacaaagaaacaaaggatctgaaagaagttataacccaagtggggttaacggatatctatagagcattccatccaaactcaaaagaatataccttcttctcagcgccacatggcacattctctaaaatagaccacatagtaggcagcaaaggaaacttccacagttacaaaagaattgaaataaccccctgtatcttatcagaccaccatcgagcttcaacagactcgagagcttcccactccaattgccctgttgggatgccacttgtagactctttctgtaacacatctctgcagcacccatcattccttgggactgatacacctgtgccaaccactaagggacaaatgcagaacatttgagtttcctacagtctggttccccactcccaagaaattcaatcaactctaatgggttaatttttaactcaattattggtattctttgtgcccctcaaaacaatgagagtaatcacattggttattctgccagcaataacttcctagccatatcaagctgaagtctaaagagtctccaaagttgacaaatcaagaatattacattacaatgcaaaaactattgaataaatgacatgaatactaataaaaagcaagtttattcagctgtagtactaaaaaaataatccaccactaccaagtaggctttatctcagggatgcaaggatggttcagcatacgaaaatccatcaatgaaatccaccatataaacaaactgaaaaagaaaaaccgcatgatcatctcactagatgctggaaaagcctttgacaaaatccaacatcccttcatgataaagatcttggagagaacaggaataacaggaacgtatctaaacatgataaacgcaatatacaccaaaccaatagccaacatcaaactaaatggagagaaactcaaagcgtttcctctaaaatcaggaacaagacaaggctgtcgactttctccatacctcttcaatattgtacttgaagttctagctagagcaataagacaagaaaaggggatcaaagggatacaaattggaaaggatgaagtaaaactttcactatttgcagacgacatgatagtctacattagtgnnnnnnnnnnnnnnnnnnnnnnnnnnnnnnnnnnnnnnnnnnnnnnnnnnnnnnnnnnnnnnnnnnnnnnnnnnnnnnnnnnnnnnnnnnnnnnnnnnnnnnnnnnnnnnnnnnnnnnnnnnnnnnnnnnnnnnnnnnnnnnnnnnnnnnnnggaaacatcacctttcacaatatccacaagcaacataaaatatctgggggtaacactaattaaaaaagtgaaagatctttacaataagaactttgaaactttaaagaaagaaattaaagaaaataccagaaaatggaaagacctcccatgctcttggataggtagaattaacatagtaaaaatggcaatcctgccaaaagcaatctacagattcaatgcaatccccatcaaaatcccaacacagtttttcacagacattgaaagaacaatactcaactttatatggaaaaataaaaagcccaggatagccaaaacaactctcaacacagtacaataaaggatcttctggtggcatcaccatccctgacttcaagctatactatagagccatagttctgcaaacagcttggtattggttcaaaaatagacagatagaagaatggaatcgaattcaagacccagatactaacccatgcacctacgaacaccttatttttgacaaaggtgctaaatctatacaatggaaaaaacatagcatcttcaacaaatggtgctggcacaattggattcggacatgcagaagactgcagatagatccttacctgtcaccatgcatgaaacttaagtacaaatagatcaaagatctctccataaatccagccacactgaatcttccagaagagaaagtgggaattacccttgaacaaattggcacaggagaccgaacatcaagccagtagcacagacactaaggtctgcatttaataaatgggacctcctgaaactgagatgcttctgcaaggcaaaggacacagtgagtaagacaaaacaaccacccacagaatgggaaaagttcttcaccgaccccacatctgatagagggctgatttccaaaatatacaaggagctcaagaagctagccaccaaaacaccaaacaacgaaattaaaaagtggggtgcagaactaaatagggaattctcaacagaggaatctgaaatggctgaaagacacttaaaaaagtgctcaaaatcattggccatcagagaaatgcaactcaaaacaactctgagataccatctcacgcctgtcagaatggctaaaataaaaaacaccaatgtcaaaagtaccaatgacaacctatgctggagaggatgtggagaagaaggaacactcctccattgctggtgggagtgcgatcttgtaagaccactctggaaatcagtatggcggttgctcagaaaaatgggaatcagtgtacctcaagatccagccattcctctcttgggtatatacccaaatagggcatgtacttacaacaaggacatatgttcaaccatgttcatagcagcattgtttgtaatagccagaacctggaaacaacctagatgcccctctattgaagaatggattgagaaaatgtggtacatttatacaatggagtactactcagcagaaaaaagcaatggaatcttgaaattcgcaggcaaatggatggaactagaggaaaccatcctgagtgaggtaacccagtcacaaaaagacaagcaaggtatgtactcactgatatatgaattttagacatagaacaaaagactaccagtatataatgctcttcaccaaagaaactaggaaacatgaaggactctaagggttaaatggtccccaggaatggaagtggcatgaactcctgagctaattgggagcatgagggtaggggagaggttgctgccacaataagagcacaagaagaggagtagaggagtggaaatagaggagcagagatattgagtagggggaagaatagaggagagagagcaggatgagaaataccatattagagggagtcactataggtctgagaagagatctggaatagcgagatctccagagacgtataaggatgacactatctgacaatccaggcaatggaggagaggataacctaaaagcccttcccctaaaatgagattgatgactactctttatgccatcctagagccctcacccagtggctgatggaaacagagacagacatccacagatatacaatgagccgaaatcgggaatttagttgaagagagggaggaatgaagaacgaaggggtctgtactaggatggagaaacccacaggaactgttggcctgaacaagggagagcacatcgaccccagatgctgtccaggaggcctgtacaagactgatccagaccccagaacatagatgtcaataaggaggcctctgcactccagggagcctctggtagtggattagtatttttccctggtgcaagaagggactttgagagcccatcccatatgaagggttacactctggccctggacacatggggaagggcccaggatcagcataggaagacttggtggactttgctgtttggggggtaggttgggggtgggggaggagaaatggggtgaggggaaggagagggagaacggacttacgtgtgaaacaagtctgttccctaacttgaattaatcaaaaaaatgaaaaaaagatgaaaagaagaaaaaaatagcacagctgctactacccagaaaccctcactgtaacaaggaactaccaatgtatagtactaatgtggatcatgtctggcgcccaagaatagtgcagctttctcttaacatctcatccttctccccaaaatcctccctagaaataaatacatatagaaatcaaagcaaggaagaagtctcatcagatagttttatttttatttatttgcatgagtatttgtgcatgcctgatgccctgaggcttgaagagggcatcagataccctggagttacagatacttgagagagggtatatgggtacttggaactgaaccaggtcccctaggaaagcagccagtgcttttaactgctgaggtacctctcctatcccagtcacaaaaccttgtactacaccattttagttccattcatttggctaattatatagcaatctcctttccctgagtctaggtgacaaccaaccaaagagagccctacagtttctgcactttgtcttgtgatgtatgcctacaccctacttactaacatttccctccccaagaatgtgggtgaagaagagaaggattatctcatagattagaactattttcttttcaaatttgggcataagatgtcccctggcaatcaattaacttctccacaatctcatccctacagaataaagaaaagagaagttgggcacataatggcaacattgcccttacactaaaacatttatttcttttattaccattatattttattcatgtgtgtctctcagtgtgaacatcatgtaagtggaggccagcataggccaaaagaggtcatcagattccttggagctggaattacaagtggttgagagcctcctggtgtggttacttagaactgaaagcaggtcctccaagagagcagccagtgctcttaaccactgagccatctctccaatatgaaagatttactaaacatgaaataagaaagacctttaacaattagcatttattgtgtctagcctttaattcattaactttttgtacaagtcagtagatatgataaattaaaattcctctgaattttgtccataatttcaaaacttaatatgtaagatgcatcattgtgtttgcttaataattattgttggcattattttattatctagttacctagtttcaaccagtttgatttgagtaaactgcggactctttgttcaaatatatatgttcatggaaaaagggacaaaaatctgtttcctgttctttcacctaaatgtgatattaaaaacagatataaatcaaggccaaagatgtatgggtagttaagagcacttgctgctctttcagaaaaccagagttctgtctccatcacccaggtcaagcagttctcagtggcctgtaactccaactccagtgaaaccaaggccctctcagtatctggagaccacacacacaaacatacatgtgtacatactggcatgggaacttgcacacatacaatgaatttaaaattaataatttgtttggttagtgcagatgtaaaccaaaggtgactatataagaaatgcaagaagcccaataattatgggagtatattcttgggaatgtacatcacacaggtgtatatgcccgtggaggcctgaagagggtgttgcatacataaaagatggagctatagggctgccagccatattctgtggatgctgggaaccaaattcaagttccctataagagaagcaagtactattaccagtgaacctccagggagttttagaatatgatttccatttttcattgttttagattcaatgtatttattcattatccatttaaattccagaacattgtgaagtttctaaataagttatcttttatgacctgtatatcatatattatatgatatataataaataaataaataaatattaacaataaatgttaatattcttcccatcttggagtagaatttgcagaagagaaagaaagcttctctcaattttcctttgctctgccaggcttgtggaaatgtttgatctcccaggggggttgcagcaagaggctcttaagggtggtttagaatccaaacagccttgaaagaagcctgaaatcttagccaggactttaagtttgaagtgataacagagaatacaaaaggttttaagtgggagggagaggtagagagcctaaggccatgagaagtatttctatatagatgaaaagggctgccttagaaataaatctaagccctcagtcataaaacaaaagcaaaaatacccaaaaggaaaaacaaaaccatgttgcctgtgcagatggaaagttccttttccagcttatagtccacactcagtagaaggtggggagacaatgtcccacaaagccagatagaaaattgggactcctcatgtaaatggctcagataacaagagataccttggagccctggagagtttagaatttcagattaaggcaccctggttctgggatgttcttatgctgccactttatggaacatctacaagcttttcatgtggttctgcttttgtatccacttcaccttccaccataaggaggcaacaactgtgctcctgtgcaggcagacaactccaggagctctattcatgtcatactggccttttttcagctgactccaaagcacacagacagcctcttttgtcactgtaatggatactaggtgccaggctcttgccagaaaaagtatgaccttgaatgtctgctatttaaccctcataaaaagtcagactgcaggcatagcatttataaatgtgatctgaaagataagtctgtctgtctgtctccctcctccctccctccttctctctctctccatcaagagtagagcctgacacttcctcctagaagtaggcagacagtgagtcagtgaccaccactctcttccaagattccagacatactcccacctgaccagaggaatgtaatattgagaatactagagtaagtaagaggagggagagtgactgaagatctgttccaaaaaacccactggttcaccaagctgggcatgaatgaaatacttgcttctgcctcttagtgtcctcctctctatctctatatctcccccaagaagtcacatagcagtgagctatttttttattagaaatataggtaggctttaatttataaagagtctaaatttcctgaatggttttaattctgtcttgcattttgtgttttaaatcttataaataagtgtacagctgtcagaagtatacatatatctctgcttattccagggttttatcttttcccacccacacatctcagtctgaccctgtacttcccaattataatgagctacaaagtacacaaagatcatcaatagtaaaattcttattagagtcattggcatgtcataaactgaatgatactctcaaaaaaaatcctttcccaaaattataccttaggttcatacggattttcaaaactacagctgataaattagccttgcacctattccaagtttgcccttcaatttgccaagcacaggttatgctaataactttagattgttttaatgtcaatgccattatgtaatttaaatttcagcttactggaaatacaagtttcttcttcagtaatgttttaaaaaaatattcttttcttagtggcataactaatgagccaccaaaaaagcatgtgtacaatgaggaaagatattaaataacaactgacagagtcaaatgaaaaattgctacattttgacatctaaaggattattttcaattatttttcttggacaattaagcatgttcaaattccataatgggctgtgtcagtcatcatcatacataaaatgcttccgtggtgtacaataagcttttctcctcatataaatatctaaggacctgtaattacacctcattaaaccttgccaccatcatttggaagtctcattcataatatttagcctaaaattgtactaaataattaaagtcaattatttccaaagtactcatgaactttttatctgggaaatatttaaatacacacatgaggtaaagcttcaaatattagtcagtggtgataaatgaaatgtcaacaatttgtttttactactgtagaaaatgtgtaccagaataattttatttttattttatttttaattacatgtagacatgtgagaagatatacttgtgtctgcagatacacacagaggacaaaagaggattcagttcccttgaattggagttacaggaagttgtaagccatctgagtgagtgctgagaacctaactggggctctctgcaaaagcagtacctgctccagcccattgatgaacttgtgatatgtttcctatgtatgcttgttctgtaaggctcatcaatgattcatcaaaataaatgaactcagtcagcattttacccaatgctaagtaggtgacagccagttaaatacacaatatcatttgtaacaaagcatatcaagatgtcactagcagcctcctcagccagggacaaaggagtctattactaatagcatgagcaagagacaaggtgtcaatactttgcaagttccgtgaatcccaagctctgagggtgacataagagagaccaatgggtttccctgaaggaaaagtcgagctcagagatcccaaatttgtttagtggtggaaagactgcttaatctttgtaacagaagaaaattgatgcaacagtctatatataaacccaccctttgattcagtggaagacacctcaactctcttcatacaacatccttgaaaacacccacatcaaggatctccagcccagtgtttctgcacttctgctccaggtaaacacatgaaaacctatagtaaattgttttacaatatacatacaacatacaagaggtcccggtagcatattgcaaatatgctcccaaataaaatcttatacacttgactaacatcccccatcaacctgcccatccctctcacatcacacccatcaaatatatacaatcagtatcaattaaagctatagtaacaactttaatagactgtcaacagcagaagtacagtggttgttagtagctaagtggctgctccacgaatttgcatttctctgcaataagtaaagaacaagataggaagaagagagaaggaagggtagagggaaagaaatggggagaaaatgggtagggatggaagaagaaaataataaaatgggaggaagggaagaagaggaaagtagtagggtggagaaaagagaaagcaagaagaggaaagggaaggaaagcaggtaagagaaaaaggaggaggggagagagggagatcttgccatttctcttatctaattgggaataacaggtgttttgttgcttttttttttagctactgtagttgtctactcagctattctaaatttatgttcagtaactgacagactatttaaagatacaaatccataagcattctgacttagcaagtatggaatgggctaaaaaaaaaaaaaaaaaaaaaaaaaaaaaaaaaaaaaaaattttcaaaaaaactattctcagcagtgttcaagattcttaaacacatggtaagtttttcagtttcataaattcctaagtgaactccaaagatagttactatatgccaatcagattgtacttcccccaaaagggaaaaaaaaaagctgcaagacaataagaaccatacatagtagagacaacagcaaactggtataaccagttcctcatttctattgctctccttgggtgaaaatttttatgaggtagcagtgtgacttccaggttgtgaccacaaaaatgtaaactagaaaactcaacagacaactcagccaggaaaggacttgctttgcaagcacaagcacctgagtttgaacccaggacacaactaaaagttggaggcgtgatggttggcactaacagtcctgaggcttgaaagacagagacaagcagtcctgaggctttgtggaaagacattctgtctcgtttgggggagaggaaaatgtagctcttgaatagactgcccaaatccatcagaagaccttccaaatagtgcttttcagacacagaaatggatgtttgtaaaataggcggacttattgtacacatagaaggtatgtagcatctcatcaatgagtaacccaaacaaataccaggtgtttgatatgttctggaccttgcagaggcaacatactatgaaggacaaagaaaaatacatataccattttttttgttcttaaatgtcttcagctaaatgagagaagaaaacccttatacaaaaaaaatttccagataacagaaaacccacacaataataacagcaacaaattggtacagccattataatcagatagtaaactaaatatggaggaggacacagaggatgagaaacatggaggaaggaagggagagcagtaactggattagtttccaggcttactgatgcaaatgcaaaaataaaaagatgtgaaaaaagactagcactagcaagtcaatcctgaataaagctctaaggactgttcactaaatgaaatccaagggcaacagaatcatcaccccatattccccgtgttaatatccacttcctataacccatgtgttatttttagtcattgcaaagttctacttcacttttaaggtgctaactttaaggatggttcctcctttaatttttgatatctcaaacacaaaattcatgtgagtgtcatcaagtctacctccaagtatctacttaactcctctcagctcgaactgtgaagtatggctgattgtgaggctatgtgtcaataataattactgtttaatttaaatctaaaataagtaagttcttcatgcataatattttgaactgttcatatgattacactgtttgcttgattgtcccctcatatagccttctctatttgagtactacagatatgcaatgacaagcagaagaaacccagcatattaaacaaattcagatgaacttctaccattctaggtggatgagaagggcgattctaaaggaaacaaaggtttggggtcttattccttaaattgccattggtcatacttctttctgtttaatgttttccatcccacaacataattcctctgtgttgactgacaataatactccaaagacaatactcaatttctgagttgcacagcttttaacatcagatattagctatttccaatgtaaaggagtcttgagactgataaagaaaatccttctgtagtggcttgcatgaaatgtgtcattctcaagtctttcacatttgaatacttagttccccattagtagaacaatttagaaaagcttaagaggtatgatctgtggaaaaagtgtgtcactagggacagactttgacacttcagaagatcattcccagtgtgccctcatcctcctacttgcagatcaagatgtgagctctcactgtttctgccaccatgtttttgccctgccctcatggacttaaaccataagtctaaatggttttattttataagttgcctcagtcactgtatttataacaaaaatagaagcctaactaaggcatcacctaacaatgacttcaatgatagtcaactgtattgtatattctcttcagtgatataattcatttagagatcactgaggacaaaaagataagtgttgcaatggcatatcccttaagaagacaaaatgttcaagaggatgaagaaaatactctaaatcatattggcataaaggtctcatagaagagctgtcaacacaggttccagtagaagcaaaaaggttgggtactcaatagaaaccacagggaccatggaacagcacatgccagtaggttggccaacaaagggttactacacatagggcataaagagacaaaggtctgggaagcatagtgactgtactgattatttgccaattgtgtttcagttccatttctataatctgaagaaggaagaaaaatgtaggtgttacatgtggcattttgcagacaagttttctagttggctccatttctgccaagcataaacatggggagaagactggacacaagtaaaaggaatcactttcagtcccaacttgtcctaatggtgatagccactttcagagaccctgtgtccatgactctgatctcagcaacactgtctggttgccccaccctgcattgtagtgaggcaaggttttgcttctgttaaccaaaaataggagttgcttctaagtgtaactatattaatcctcacccttccctccttccagtcttctgatgcctgtcagctaaatcccctctgtaaagtctcttctgtctgaaacacagtgcagcatctctttgcctctcttgtatgtggctgataagggtatgatcatttgctggatttctccaattaggtacctcattttcttgaggtttaatttagtgaagaccccatctttagtgtaattaaagacataaggaaaatgtgtttttgtaatgatgcaatgattatttaaattatggcgtgtttgccttgtgaagtatctacagaaagcaagactaagaatccagagggaggctacacttgactgctacaatgagaatgaagtctcctgggatagtaaatttgtgacttagctatgtgtgctaactgatgtgtatcagagttgggctcctaccctcctgcagagaaagaaattctctttcttgattgcattaagggttaaggggggttcctcaatgaggatattcttgagaaacctcagacttacacccaaaggaagagaaaaagaatttaaattccagtgtctaaagcaaatgttctccatgggaagttagggatctgcagtcaccaataaactaaacttcttgagcagaaggggccttagactgccttggtcttctcagagctacatttcactttgcttcagtgtaatccagagaataatctatgcaatctataagggattttaagacctggacacctcacagatcattatgacagtcgactgcattacagcaatgctggttggacagagcaagtgggaagaagtgaacacaaaatgtctaatagtaaaatacaggtttttcaaagtttcaactcgagaaaaattcagtctctgactctcagaatacagtcatctggagtacgccatgatgatttcctcatagaacaaaagtaagaaaaatactgattataatgaagatgattactatagatgtctgaggacacaaaatcaaaagggaatgtcagtgcaggactgggtcatcctcttggagggaaggctgtggactcaggactttagcaagaaagtttcacatcacacagtcagtgaaagaactctgagctcagtttcctttgacatgagagctgaaggcagagggagaaatgcagtggccaagagaattgtgcccagttacacaacagcataggagtgtgttcttccttgtttggtgtgtacttgttagactcactgctttcctttcttcttttcacccttataatgcaatttaaaaattattgagaccaattgacttaacaaggtggcctttagttgactccagaatgtttcatgagaacttgactgtatgagaagaaaaaattatactactcaaatattgatggtgactgctggagcttctaccattggcaaaatgctgacaatgtacttgtttttaccttttatcatattttggagtgtggggggcatgtgtggggggaagggggtagtgttcaagcacctgccgtggtatggctgtagggagaaaggtatgtccttccactgcatgggtcctgggcactcagctctgagttcaagtcaggttctgtgcaagtaccacacatctgaggttgtaattatttgttttatgcacattgactcatcagtggaatctctgagctggcattgtcccctgaagtgtgaacattgcctgtcaagtgtgaaccattcccatgttgcacgctttaacctgttctactgttctgaggccagaggtaccagataccctcacagaagcttcacatcaggtcctgcctagagggtcaggaaggttttagaaagaaagaggagaaaagaaagtcactccacactgtatttttctctcacatcttcagaagggtttggtcactaaagcagctacatctttcagcatccaggacaggaacatcctctccagtacctgtaaagagtcactgaaatgtcagtaccagccaggtaccctctcacacatcagcatctgtcccttccatgggcccaatctctgaagctctgtccctgattgactgtcttagagccttagaaggtaacagcttttaggagtgggagcctctctgacacctgctcctgtagaggaggcagcctctgacccctaaattgtgagatttcctccttctttcttccacttacattcaaaaccatcttcccgcagctaaaaacctcttactcaatttttttctagttttcaacacccacagagttctttcctacattgttttcccagttcttcaaacattgtgcattgaaattaaaaataaaaatatcagaggctaatttttcactgggcagccaggtgctggcttcagggctccccagggatagattcaaaccctgagcaccagcaccctgttccctgagtgaagcacagtcctgggggaacagcatagaagaaggatacaagcaaacagcttaaaaatatttgaaggaaatacagccagccttacagtactcttctcagagccccctgaggcctgggaactgtgcactttggagcccatcccagtgatccagcccacccagagactgtcaaggccccagtactagtcctgcctccacccaagggaagagaagaaccatcagagtattggacctgcttgcacccaccagaagggaaccttggacccatatccaccaagagaggaagacactacccctgccctcactggaagaaggaatgggaagaagacaatataaaaacacatttaacaatttaaaaaaccaatatggcatcaccagagtgtaaggaatctacaccagcaagacctgaacatctcaatgcagatgaagcagaagagaatgactttaaaaacaacttcatgaaaatgatagagtccctcaaagaggatataagaaaatcttttaaagaaacagaagaaaaaatacaagaaatcaacaaatctcttaaagaaagccaggacagcaaagaaacaatcaaacagatgaaggaaacacttcacacagttcaagacatgaaaactgaattagagacccccaaaactgaagaatggatagagaaaatgtggtacatttaaacaatggagtactactcagtgggagaaaaaaacaatggaaccttgaaattcacaggcaaatggatggaactagaagaaaccatactgagctaggtaaccaagtcacaaaaagaaaagcatggtatgtactcactcatatatggattttagacatatagcaaaggattaccagctcacaatccacactgccatagaagctaggaaaagaggaggaccataagagagacatacatggtcccctagagaaggagaaagggacaagatctcaacaaattgggagcatgaggagagagggagctaggagatgggaaggggagaagaggggggagaggaggacatgagggaacaggaagacctagttgggggagaagaataaaggagagcaatgtaagagatatcataatacagggagcctttataagtttaaagagaaatcagatactagagaaatgtccaggaatctacagggatgacaccaactaacaatctaagcaacaaaagagagactaccttaaatgccctcccctgagaatgaaattgatgactaacttatatgccatcctagagccttcatccagcagctgatggaagtagaagcagacacccacagctaaacactgactgaactggaatccagttgcacagagagaggagtgatgagcaaaggggacaagaccaggctggtgaaacccacagaaacagctgacctgaacaagtgggagatcatggtccccatactggtagctgggaaagtagcataggactgatccagaccccaggaacatgggtgtcattgaggaggcctcagaaatgtatggagtctctggtagtagatcagtacttatccctagcataggaatggactttgggaacccattccatatagagggatactctctcagcctagacacatgggtgagggcatatggcctatcccaaaggatatgacagactctgaagatcccccatggaaggtctcaccctccctggggagtagaagggtatgggataggtagggtgttagtggaggcaggggaggaggggagggagagggaactgggattgacatataaaacaatcttgtttctaattaaattaaaaagtggagaaaaatatatatggaataatgactaacttatagaggttcctgaagaagaaagaataaaaagaacagcagaaataactgaatattaaatgctaacatcaattaaagaagcaaaaaccaaataataaaaatgaaacttggctaatctaaaataaattctttgggcccagcatgttagtgcatccttataatctaggcattagaaaggatcatgaatttgaggctagcctgagctatgcagtagattctgtctcataataaagtattgacagaagcaggggaaaaaagaaaacataaactgagggaatgctggaaaggaaaagctgggtaaatgatcaggaactacagatgcaagcataaccaacagaatacaagagatcaaaaagagaatctcaggcattgaagatacactaggagaaaagattgattgaccaaagaaaatacaactaatcactaacacagaatatccaggaaatacggggtaccgtgaaaagaccaaacctaagaataatgggcacagaagaaggtgaagaaatccacctcaaaggttcagaaaacattaaacaaaatcatagaagaaaactttcccaacctaaagaaaaacatgccaatgaaagtacaagaaacctaaggaacacttaatagagtggactacaaaaaagtccccttgccacataataataaaaaccccaaacatacaaaatagagagaaatattaagagcaactaagaaaaaaggccaagtaacatataaatgcaaacctatcaaaaatacacttaacttctccatagaaactctgaaagccacaaggtcctggatagatattctaccaactctaagagatcacagatgccatcccagactactacaccacacaaagctttcaatcactactgatgaagaaaacaagatattccatgacaaaaccagacttaaacaatacatatctactaattcagccttacagaaagttcttgaagaaaaattccaatgcaagaaagttaactacaaccagaaaagcataggcaatagataatcctactttaacaacagctaaaagaaagaaggggtggaaattcacacacaattccaccaacaacaacaaatctaaaacaaacaagaatgaacaatcattaccattaatatctctcattattaatggacttaactcacctataaaaagatgcaggctaacagaatggatatgaagacagaatctatccttctgctgcatacaaaaaacacacctcaaattcaaacacagagagtacctcagagttaagggttgggaaaagattttacaatcaaatggacccaataaacaagctggtgtagtgatcctaatgtctaacaaatagactttaaactaaatcaatcaaaagagatgaaggacatttcatattcatcacaggagaaatccatcaagatgaagtctcaattctgaacatctatgctccatatatgaagtcatccacattccaaaaagaaacattactaaaagtgaatccatacataaaacctcacacacttaagtgggagaattcaacactccactttcatcactagacaggatcaccaggcagaaactaaacaaagaaacaaaggaactaacagaagttatgacctaattgggattaacagacatctatctatagaacattccatccaaagacaaaagaatataccttcttttgatcaccacaaagaaccttttcgaaaatcaaccacatacttggcaacatagcaaacctcaacaggtacaaaaacgtagaatagccccctgtagcttatcagaccaccaagcttaaagttagaattcaacaacaaacacaaattgcagacatcctacagactcatggaaattgaacaatgcacaattacaccattcctgaaccaaggaagaaataaagaaaaaagttaaagacttcctggaattcaatgagaatgaagacacaacaacccaaacttatgggacactttgaaagcagtggtaagaggaaagttcatagcactgaatgcccacatgaagaaactgaagaatagtcacactggagaattaacaacacaactggaaactctagaaaaaagaagcaaactctctgcagaggagcagatgctgggaaataataatttgagagctgaaatccaaaaagtagaaactatgaaaaaatgcaaagaagcaatataacaaaaagttggttctttgagaaaatcaacaaaattggcaaacctttatccaaacttaccaaacagcagagagtgaacatgcaaattaataaaattagaaatgaaaagggggacatatcaatggacactgaggaaatccagagaatcatcaggtcatacttggaaaaaatgtattcctcaaaatttgaaaatctaaagaaaatggacaattttctgggtatatataccttacaaaaattgaatcaagaagagataaacaatttaaatagacctttaaaccctaatgaaatagaagcagtcatcaaatgtctcccaaacaaaaaaaagcccaggagcagatggcttcagtgcagaattctaccagaaattcaaacaagacctaataccagtgctcctcaaattgttccacacaatacaagcagaagggtcattaccaaactctttttacaaggcttcaacaaccttggtacccaagccacacaaagacacaactaagaaagagaactatagaccaatatccctcatgaacattgatgcaaaaatactcaataaaatattggcaaatcaaatccaagaacacatcagaaaaatcatccaccatgatcaagtaggattcatcccagggaaacaaggatggttcaacatatgaaaatccatcaatgtaaaccacaatatcaacaaactgagaaacgaaaatcacatgaacatctagctagatgctgaaaaagcctttgacaaaatacaaaggtcttggagagatcagaataacaggaacatacctaaacataataaaagcaatataaagcaaaccaacagtcaacatcaaaataaatggagagaaacacaacatgattcctctaaaatcaggaacaagacaaggctgtctactctctcaatacctcttcaatattgtccttgaagttctagctagagcaataagacaacaaaagcagatcaaggggatacaagttggaaaggaagatctcaaactttcactatttgcagatgatatgatagtttacataagttacccgaaaaactctaccacagaactcctacagctggtaaatcttcagcaaagtggcaggatacaagattaactcaaaaaatcagtaggcctactatatacagacaataaatgggctgataaagaagtcagagaaacatcaccatttacaattgcctcaaacaacataaaattccttgggataatgctaatcaaacaagtgaaagacctataaagcaagaacattgggtctttaaagaaagaaattaaagaagataccacaaaatggaaagatctcccatgctactggataggtagaatcaacatagtaaaaatggcaatcttgccaaaaggaaactacagattcaatgcaatccccatcaaaatcccaacacaattcttcacacaccttgaaagaacagttctcaactttatatggaaaaacaaaagacccaggatagtcaaaatgacccagtgcaataaaggaacttctgggggcattaccatcctgacttcaagctctattatagaggtatggtcctgaaaacagcttggtattagcacaaaaatagatagacaaatggaacctaattgaaaacctagatatggacccacacacctatgaacaccttatttttgacaaagaagctaaaattatacaatggaaaaaaggaagcatcttcaacaaatggtgctggcataactggatgctggcatgaagaagactgcagacagatagacagatacacatctatccctatgcacaaaacttaagtccaaatggatcaaagacctcaacataaatccagccacactgaacctcttagaagagaaagtaggtggtgttctcaaaagaaatgatacaggagactacttcctaaacataacaccagtagcatagacactgagattcataatgggacatcctgaaactgagaagctcctgaaaggcaaaggacacagtcaacaagacaaaacagaagcccacagaatggggaaagttattcaccaaccccacattgacagaggcctgattttcaaaatatacaaagaactcaagaagtagtcacaaaaacaccaaataatcgaattcaaaagtggggtatagaactaaatagagaattatcaatagaggaatctaaaatagctgaaagacacataagaaagggttcaacatccttagccattagagaaatgcaaatcaaaacaaccatcttgctcctgtcagaatggctaaaatcaaaaacaccaatgatagtttattctggagaggatgtggagaaaggggaacactcctttactgctggtggactgccaacttgcacagccactttggaaatcagcatggcagtttctcaggagaatggaaatcattctacctcaagatccagcaattctactcttaggcatatactcaaaggatgtacatatatacatcaaggacatctgttcaactatattcatagtagcactatttgtaatagccaggacctggaagcatcctagatgcccctcaactgaagaatgaataaagaaagtgtggtacatttacacaatggagtactactcagtgaaaaaaaagaaaaacaatggaatcttgaaagtcgtagacaaatggatggaactagaagaaaccatcctgagtgaggtaacccaatcacaaaaggacaagcatggtatgtactcacttatatatggattttagacatagagcaaaggattaccagcctataatccacattgccaaagaagctaggaaacaaggaggaccctaagagagatacacatgctccccgaaagaaggggaaagggacaagatctcttgagctaattgggatcatgggggaggggagagggagttaggataaaagagaaagggagaaaatgaggggaaaggagggaggagaatgagggagcaggaagattgagttaggggaagaatagaggagagcaagagaagagatatcataatagagggagccatataggtttaaagagaaatcctgcactagggaaatgtctagcgatctacaagtttcacccagctaacaatctaaacaataattgagaggctaccttaaatgcccttctctgataatgagattgattactaccttatatgccatcctagagctttcatccagtagctgatggaagcagaagcagatacacagctaaacagtgaactgaactcctggaatccagtttcagagagagaggaatgatgagcaaattggtcaagaccaggctggagaaacccacagaaacagctgacctgaacaaaggggagctcatagaccccagactaatatctgggaaaccagcatagaagtgttccagacccgctgaatgtggatgtcagtttggagctctgggaaatgtatgagggttctggtagtgatcagtttttattcctagtgcacaaatggactttagtcgcccattccacatagagggatactctcccagcctagacacatggggaatgggcttagtctttgctccaaatgatatgacagactttgaagatcccctaaggaaggcctcaccctccttgggagcagaaagttaatagaataggggtgagttgtggggggagaggggagagggaaagggaaaaaatattccatactacaattctttgctcaaaagacactcagattttgaaaagactgcccaaactgaacaaaggtggaagcagtaggggtggccctccccagggaagaacacaccagttcgttgtccattgccaaacggtcagccctgaaaacacacatataggtagcataaacaggttgtgtgtgtgtgtgtgtgtgtgtgtgtgtgtgtgtgtgtgtgtgtgtgtgtgtgtgtgtgtaagtcaggcaatggtggcacacacctttaatcctagtacttgggaggtggccagcctggtctacagagcaagctccagaacagccagtggatacacacagagaaaccctatcttaaataaaccaaaacaaaaaaacagaaggaaggaggaaagaaagagagagaaagaagaaaagagagagagagaaagaagatctatgtatacacaaatacatatataaatatgtaacaattagtgacaaaaaagaggccatggatttgaaggagagctgtgggggatatattggagggtacggaggggagaaagggaagtgatgaatgttataactaaataaaaataaagaaaagaccatcaataaaaaggaaaagaaaaaacaattgaaacagtgcccatggctacagagtgactacacaggtgatcatcagtggcacatgggttcatggcttcttgtgtttcactatctgcttgtgagctttcaagactgtgctgatgccattagaggcaacagttaaaacattatttccatgaaacaaaactaaaagagaagctatagggcaacagcagctgcattccctaccctgatcaacatgagaaaataaagaatataagtgttccttgaagctaaaatagcctagattctaggccctagaggcgatacctgaacatacaaaacaaaatgagaacactgaggagttatggaagcttaaaaaccccaaacaaaataatgatgaaatttgataataattccattaaaatgcacaaagacaaagcccatgtgtccagaatgttcccctctgcattatgtaactctagcattccacatttcctatgtggattcttggtctctattttaatataaggttaaatgtagtcaaagctaggattattcctgagtttgttgtcctagtatccactagatgggaatctatagatgtagacattaaaaacaaaccatgactggagagatgactcacagttaggaggactagctctccttccaaaggacctgagtgagattcccaacaaccatactgggtggctcacaatcacatgtaacttcaacaccctcttctgaacttcaagagtatgaccctcaggcagcacatcaccacacagatagaaagacatgtgcataaattaaaacataaaaatctttttaattaaaacataaaaacctttttaaacacacatacattactttgccatcttaaacattactggcctctggttggagctcaaatacttgaaatattaactactatttactcagctctttgggtcagtttatgaacatagagatggaggcagtgaattctactttattttaatatataagaagatgggtttgtcaagtaacccacctgagccaagattaaaattcaatcatttcaaactaaaagcacatgtatagtaggttttaccaacggattaaattagtattctaaatactctaacaattgccttccttccacaacatccacagagagattattggcaaaaagttctattcaggggcactcacttcacacttagatattatcacagctgtgttgggctagtcatggttttctataaccatgcctttcactttgaattttgctgttacttctgtttcatttagttttagagagagaaaacaaggccagcagcctgagaccaagccactcagtttcagagacaactgtgaacttataaatgggtggttctactaactatgcaactggttatcaaactcaaggaaataataaaaagggaaggaagagtgtgaccatagcatccatatacaatacatgcaaatggaagtttgaactgtctaagacccatcatgagttaaaagcaatgactttgctattgagaatgagtgtacattaattatcttatacttttcacaatctggtggtgtgttaccagaggttggtggtctttacagacatcaccctggttgattaagcctttttctttttccctcttaagggatgacctttacatgtgtgtataactctctgcctatactatagggtaagcactcaataagcaatcattaagagggtctgctatgttctgaagttggtgtgggtacatcagacttaattgtacatatcatattcagtggcagaaaactgatccctaagctaaaggccacagtccagactactgtgtctcatataacacaggataacatctcagagaggtagaataaattagcatacgtatatttgatcatttttaaagtatcaagtgaaagcattaataagtaaaaatttcaagaaatgttctctttaattcatgaatcatattaactattaatatcaggaggatggagggagagtacatacttcaaataaaaggcatcttctgtagaattcaaggaagggtaggtttctcctgcagcctacccctgtgaagaaacttcctgatcctgcacaccaaatagcccctctttatcctctctctctctctctctctctctctctctctctctctctctctttctctttctcacacacacacacacacacacacacacacagacagacacacacacacacaaacacacctagtcacctgcttgtgaaagaaagaaaacagacttccactgacctggcagggctagtccctcccgcctccttggcagtagtaagtaaccaaaacaaaataaacaagattgaatgtgcagccaaagtctggaaattcagccttaggaggaggacagggtccctgctggacagaggggaaaaggctttttggttttttgagacagggtttctctgtgtagctttggagcctatccttgcacttgctctggagtccaggctggcctcgaactcacagagatccgcctgtctctgcctcacaagtgctgggattaaaggcatgagccaccaatgcccggctggggaaaagggtttttaaagaaaagaatgtctaataaattggagaggatggtgactgtttccctggaactacaaaggaaaagatttctgcacagacctggtagataagtcctgcactcagctggtttgcttaattataggaaatctaaggtgtcccattagttcaggctctactgtattaagcgacagttttcagagatcgaaatgagtctgaaatcagagaaagatgccttgactctgtggggtaagcttatctcccagccgttttcctagctcagctctagtgtctggagtgatgttaccccagacacaacagttatttaatctcacttcgtttttcaatgtcaaggcacattcatattttattagtagaaacaaagtccattagcaaatttttcacatgaatgaatgtgcagatgcctttaaagtggcatgattcctttgattgttataacttcatgttaatgttagatacctaagtgtagagatctgtgttcttctccccctctgcttatcactgtccagtaacactgagtaaccagtgtcttcccaactcattaaccaggaaaacaggcacatgcagtattgaaatgatagctaattaaaacaaacagctttttaccaaggaaatattaaaaagctataacttaaactcttatgtgtaaatgcatcctgttacaaggctttagttgtgatttcactaaaatgctggtattaaaatggatattttgttgacaaacatttataattttaaatgaccctcaagtagtaaatataaataatttaattcccaggacacagttctgaatttcttaacagtatttgtggtggacaacagaatatgtggaagaaatatcccagctgaagcaacgattcagcagttaagagcatttgctacccttgcagaggacctgagttcagttcccagcatccacatgggaggtaggggctcacaactgcctgtaactatagctacaaggattctaatgtctctaaaccatgggaaccgcgcgcgcgcgcacacacacacacacacacacacacacacacacacacacacacacacacacacacactttggaaacaatattttggaaaacataatatctcattaggacaaatccatccctcatatttgaaaggaccaagcaggtgccataaacaggctgcccagtcttctctcagagatcaggcctctatttcagtttcctgaaactgaactagtagtttctaaggaagagccacaaataaagggcaatcaatccccaacacccccaacagcaaggaagaggcctggaacgtgcaatacctggccagggcagacctcagccagcctctacagcagctcaaggacaggacctgggacttatccaggcctgcccaaaatggaaaactgtaaccctgaccagcccctgactggctccatcgaactagaacatactaatatgattgtcacttgcttaagccaatcatatctaaaatgacgtgacttccttagacactctcctcagcaaggcttaaaagaagcacccacctcctttatggggttgtggccatcttgcctttgtgtagagtggtcggcccagcatgctgctataataataatttttttaaaaaaagactctgcttctacattgggtctggtctcttggtagtcttttgggggtctggactcagggcacaacaatattcttagttctaagccccattttctgcaggttttttagtaacacatcccccagattacacagcacatttggtttcactggacactcaaaagtcagtagtttttccttgtatcgaaattcaaaaatctacgatgtcatcttgggcaaagaagagaacaaagacagatgagaatgaggcagtcattactgactgaccatatgatggtctttccccagatgcaatgaaactttttagaggcccagaagtttacctatcctgttattctttagaaacaaacctgggaaatggacactaaaaattaattagctgtccccccctctatccttaattttgaaatcctcttaaattcaagagtgatgtttatttgggacgtgagtgcttgacccgggatactgagtgctatctattaaaccggcaattcgaaacattatcagcagggttgtgcaactggaccgttttatacacagtgagtgaaaatcaatggtctgtctatgcctatcacagcatgtcacatctctgattgaatcttttgagctagcttatcagacatgcagcacagggataaatttatctttacaccctctatatgtgtcaccaaaaatagcccgaggatcagtataacctaatgaactaagaatgtctgataaatgattacaatgtcctccgaagtgaaagcagcagcctatcctttggaggtagagtgtgttaccaaggagaatctaggtccctagaatttgcttcctaaaaaatttcatacctgtcagttgcactgtcttaagattttgctcccagttttatgtggatgttttgtggaaacatacacagaacttatttgaatcatcattatcatgtgggcttttgtaaattttgtttttataccaaactaaaaaggaatctacattttttgctttttaaagtgctatacattataaacgtatatatctaaatattttcaaattaaagcacatgtcttaaaatcctgaggactagagtttggatcccagagccaatataaatacaaggtgagcacggtagctcaccagcatttccaatgctcagagggtagagacaagggattccctaagcaagcttgctagagagactagccaaatacgggagttctggattcaccaggatgagtcaagttgacagtgataaaagaagtgtgtcaactgtcagcttttggcctggacctttaagctcacacaaatgcatgcataacctcacacttctataccctcactaataaacccacacaacaataagaagaaaaaaataaaacttcagtaaacggttttgttaaaaaaggaaaaagaaaagaaaagagaagaaaagaaaaaggtttaaggagatgactcagctggtaaaggcacttgctgccaaagttgatgacctgggtttgatcagagggacctacatggtggaagcagagttttgactcccagaagctcctctcacttccatatgcacatacacaaactaaaaataaacaaaatgtaacaaaaatagtatagaaaaattatgtgtctttatagaatactgcctgcacaagcaaagagaaagctattagcaaaccattgccagtgggcaggagagtgattgctccatggatggaaacagacttgaaatcatgcatgaaaatgcatatggcagctttggcttagaagcatacagacatgaatggagcaaatgggtccacacaaaaatgaaacttaccattttagcttcatcacaaacccacactccatgtcaaagacacaacattagctttccattgcaaagacacaagtctctctagaaaaagcaagtgatgttagaagatccactctgaatgtacttctcactccaaccacaattgtatcctcatccatttcactatctgtggacactgtgctgagccatcatcataagcatagtgggctcaaaatgggcaaataatgacatcctccctcaaggagttttcaggtcaagtaggagacaagacaggaaatagtgtaagcagccaacataacaaaatgtgctatgtataaattgttaaagggacaataaaagattgagttcccaaaatagaagtaaagctttgttagaagcctagaagctatcaacgtgagcaaaggactgaaatttccaagaacttggggaagtctgtctatatctttagggtgtcttccttccagttcgtgccctgtctgttcctgcatgatgctttccaatgctcacatctacactacagctgttatttcctcttgattggcttccacccatccttccatgttgtaatttcttgatgttttctttcaaatctcagtagtctatagtctacgtcaaaagaagggctggacttgtcactttagtagtctaatattgtccaggagcaagacactgaacaagagctatgtcaatcattgacaaattaaaaatgggaaaaggaatagtttgtggaaaaacaggattgtggaacagctagctaggattatggaatgacacacaaaattgagacagctctaatcactgtaatgtgtaagaacaacaatgtttttgtagtaccaagtaatggtgattaagtcctagaaactaaattctgtagaccgtattctgctgccatttgccagacactatggcaatggaacagcagttgcctgtgtacatatttcagtgtgtgtgtgtgtgtgtgtgtgtgtgtgtgtgtgtgtgtgtgtgtgtgtgtgaaattctcaaaagtaatgtaaaatgtttaaaacatgctattttactgtaataatttgaaattttctaaggcttactctatgtatctgtgccttaccaatcctacatccagattttgttgtgttaacattaatctctggtatctttatgtgataaacactcagtgtgtgataaattatattgctagacaaaatttttctgttttcctgaaaactataaaaataggaaacttttaaatgtgctgtgatttgatcttttggactctgtatgaatcagcatccatcctctgagttaggagttaccagttgctaacctaggtgacagctggctgtttgaataattgtacttgaaatatggagacatgtttttttcctctctgaatctgagtcctccaatctttcacaaaataactggagctaatgaattgagtcttgcaatagaaagctcctttatccaaaactttggtactaccagtctttctcaatcctgtcctctgggatcacacacacacacacacacacacacacacacacacacacacacacacacacacatcctaactatgaggaaatgtatttcagatacaaatccatgcaaagctggaggaaactggcagggtgacttagagaaggacagggtctgatagccacactcctctcaccagtgacatcagagtgatccaaaagcactcttgtgatcagcctacaccctagcaggtctccctccacactgccactctctgggtccaggtgtgtaatctccagcctctttatttattcaggatacacacctgccacatcaactgagatagtttctctcagctagtctggcatccccaaatcaatgatatattgctatttgtgctaagtcctccaggacagcaacaactaaaaaggtagaggcagccagcaacacttatatcatacttaaccaagcatagagttccaaaaacaagtctgaatctccacaggtggtcacttcttgacagctatccatggctttagagatttttgctgtatatatagtcttacaagatgaacatttcagaatgagagtgcctcagtccttccactattggaccttaatctacatatgctacagaaagaccctaattcaactttggaaaaacattatgttaaagatttttttgtcgatatgaaaatctgcatctcaaatctgcctctaaaccagatgtggttgtgggcaccagtaatctctactcttggaagcctggagaaggaatgtattttctagctcattttgtaccatgtaatgagaccttacctccctccttccctgcctcactccctcccttcctctctctctttctctcttcatctctctctaaaacacacatactcacaaatgaatgtctctagtatcacacacacacatacgcgcacacacacacacacacacacacacacacacacacacacacacacacacacacacacacacacacccctgtcctgcttcctgcactgtttgacattgatttcaaagatagaaggagaaaatccagagttggaggcaggtagaagattaggcttgatgaagaaaggatttgaaccaatcatgatagatcaacactctccagttccctatggggcaaaatatatttcatagtgcagagtagagaaactttatgttgagccaaatggcaagtgcctatgtcttccacaatggtgacttgtttaattatccctaagagtctgctatgaggatcctagttgactgacaggctccagcccagccactgggactttaacccacagccacagttcttctggaagctgaccaccagtatttgtgcacagcagaaaccagagcagtaattaagttgcttctcagtgcaggatgaaatctggctttgagggttcttgtgaagctatgtgagattcggagctgaacttccatctgtggccatgcatcagccacccttctatcctgtttagctcccatatccgtattgcagtctagagcctgctcctgctacctcctgtctcatcttacacaggcatgtacatccacaatgcatcccctggatgtctaatctcattttgagcatctttcctttagaaggtttgagttgttggtatgtaaggatacaaaaagcatgaagttatgcccaatttctactcacacgggtggtggtttagtaccttcattaacctgtctgtgttttaacattaatagcaagactggatttcttctactatatgttttgagaactctaacaattcaagaaatcagcataagagaaactcaaccctccattcatgcttcacaggaaatgtatgttaagtagttttcaagctgcttcatcacatggttttcaatactaccaagagatttaatgactataatacgtgaactgtttcatgaccctctatgcacattcaaccatatcaaatatataaagtaatcagggtatcccagcactatgagaaccacactgtaggtaacagtcaaatcacatccctgcaagctcttattaataacagaatcactggtaaacagaactggttaaagatacagtatggattttgagtgttgttgctcctgggattacaaaacaaaataacaaaagccattttctcagtgtatgacattgttttcttagtgtgaacattgaggatattaatttgtagctattaacttacaataaggatgcacttggggtttttttggtattttcgttttttttttacttttgttgctgtagtcattaccacttttccctcctgatatattcatcccttttcttgttatgcccagacatcagcaatgtctctcaaccacctgaaagcattttatgattcatccatctgctgaactgtctgtttctattttatcttcacagtgcgtgatgattcacataagtcttttccttcttagattccaatggcgctgaattctaatccttcatgtcttatcactgtttacaagttcttcacagatgactcctttctcatggcagctacttcataaacaatttttaaaagcatcagctttgatctatatggttgagtgctatgtaagacaagtctcccagtggatgagacgtgagtacaggaagcttatctgacatgcccagactcctaaacatacccctcttctgaactctagagtcatgatttcacacagttggatcaatgtgcacaatctcttgaatgtttaagtaaaaaagattgttactagatttttttccaggaatatcatttgtacactactatgtgtgcatcataatatctcatacacaatagacatttagaaatgtactgtgcagtgatttcttacctatagtagacctaggcaggcacaagcatcattagttctccctttaaatccccactttttctctaaatagatggactttggtagcctggctgggtaactagtcatagactttctgtcaagggctggacttcatatggaaaacctgaaaggcagcaaagagggagtgattcacaaaggtgctttcagaggctagggaaatgactgacagtaaaatgtttgtcatgtgagcattaagacttaggttcaattccccaaaacctatgtaaaaaaaaatctagtggtatgcccgtaatttcaagatggtaaagaaaagacatccgacagagggctgatctccaaaatttacaaagaacccaagaagctagcctccaaaacaccaaataatccaattaaaaagtgggatacagaactaaataaacagttctcaatagaggaatctaaaatggctgaaagacacataagaaagggttcaacatccttagccatcagggaaatgcaaatcaaaacaactctgagattaccatcttactcctgtcacaatggctaaaaatcaaaaacaacaatgacagtttacgctggagaggatgtggagaaaggtgaacactcctccactgctggtgggagtgccaactcatacagccactttggaaatcagtatggcgattcctcgggaaaatgggaatcagtctaccacaagatccagcaattccactcttaggcatatcctcaaaagaagcacattcatacaacaaggatatctgtctaactgtgttcatagcagcactatttgtaatagccagaaactggaagcaacctagatgcccctcaactgaagaatggatagagaaaatgtggtgcagttacataatggagtactctcggcagaaaaaaaaaatagaatcttgaaatttgcaggaaaatggatggaactagaagaaaacatcctgagtgaagtaacccaatcacaaaaagacaaacatggtatgtactcactcatatgtgtattttagacatagagtaaaggattgcctacaatccacactgccagataagctagtaaacaaggaggaccctaagagagatttacatggtcccctggagaaggggaaagggacaagatcccctgagcaaattgagagcatgtcgggaggggagagagatctaggagaatgagagggggagaagaggaggggtgaggaagacatgatggggcagggagcttgagttgggggaagaacagaagagagaaatataagagataatataatagagggagatattataggtttaaagagaaatcaggcactagggaaatgtctggagatatacaaagatgacaccaactaacaatctaagcaacagaagagaggctaccttaaatgccctcttctgataatgagattgatgactaattcatatgacatcatatactctccatccagcagctggtggattagaagcagacacccacagctaaaccctgaactgacctgaaatccagttgcagagaaggaggactgatgagcataggggtccataccagggtgatgaaacccacagaaacagctgacctgaacaagggagagctcttgttccccagactgatagctgagaaaccagcctgggactgatccagaccccctgaatgtgggtgtcagtgaggagaccttggaaatctatggggccccttgtagtggatcagtgcttatccctagcataggaatggactctgtgagcccatctcacatggagggatactccctgagcctagacacaagtgggttggcctaagccgtatcccgaaggttatgacagattttgaagtcccctatggaaggctttaccctccctggggagcagatagggtatgggataggtagggtgttagttgggggggggcaggggaggagggtagggagagagacctgggattaacatgtaaaataatcttctttctaattaaaataaaaaagagctagttgatgacaagcctaagctagagatcaaacttttataattaataacaagtctccatatcattatttgggggatggcaatccaaagacaatccatcaagaaagtttgcctttcctcagcctctttccactttgagagctggtaccctattagaagccttgttggtttacaaaataaatgtcactatttatttaaaaaaaagaaaagacaagaggacccctgagtcttgacagtcatctaatctttctgaattggtgagacccagattcagtgggagaatcttaaaaatgtaagatgggccgatggagaaagacactcaactcaatgtagacttccatccttcacacacacatgagcatatgtggatgaacatatctgtacacacatgagcatgcactcagacaaacatacactttaagacagtttacttaatttagtttgtgatccttttgctgtccagtgtagactactcttgtctgtcatctgtctctgaatgagtcatttatagttacagccacttttcatctccactaggcagagttattgtcctgtttacaaagtcttggtgattcttttgaataagtcaaatttgttcttgaatcaaaatttccagagatccaaagctatacttagaattagaaaatgcatgcaaattgtcgtatgtagatcctagatttgatcaaaaaaatcaacaaatgttgattctcaaactgcaatttaggtattggaaaattatctatgatattatgatttactttcatttcattttcatttgataaattcatctaaataagctctagctagtcactggccaacaaggaaggcactcttcacatatgggtattttaaaagtaataaaatcacattccatgtgctaattagctatatgtgattggtacacaccctatcagagtgcatcctgggacataactacaagtgtgtgatgggacatttctattacgttggagagtttttctaaatcatctactaatctggagcaaacatacaactttggaataagtcatcatctgtgtcacccttaaaatgatcacaattccaacaacttaaaggaaaaagtaaccacataatttcatgtgtaaaaggtgcattcacagctactgtgtgtctgctctgtgacctcagagtttgctgtggaatgaacaatcccagatacaagcacaggagcagagccagagcatggactccaggcatgctgttgtttaccacaggaccagagtatataatccaggatgctcaggtcagtgtgagacctgaattttgacttgcacaactcaccaatgttgtggaatatttgtttaactatgcaaagatgtgttgcctttgcttaactatgtaaagatgtgttgtatttgtttatgttggggaataattatttaactagtaaagatgtgttgctgctttaccatgcctgcctaaggtacctgattggtctaataaaaagccgagggaggaggcataaggcaggacttccagggccatatagaaaactgaaacaaacaaatacacaaaccatgaaaataaacctaagacctccacaagacagtctctgaaatgaatgaaacagtgaattggaggagaaattccaaaatatggagaaaataaatcatcaaaggaactaaaacactgaaaaaataatgcttgtgacaaaagaaatggtcaattgagtgaaaaaaaaatcacatcagaaaacatcagcaagactatgcagaacaactatcatctacacggagaaaaatcaattacatccatcaaattgaatacaactcttctgatagcttcattcaataattttatagatagatagataattagttatattgttttgcattttgagaccgaatctgagggaaatctataaacactatagctaaatatgttcattcatatttcatatttttgaggatatattttatcttatgtgtatgagtacttgcctgcatatttatacatatattcatattcctgnnnnnnnnnnnnnnnnnnnnnnnnnnnnnnnnnnnnnnnnnnnnnnnnnnnnnnnnnnnnnnnnnnnnagctgaactcacatcctgtagaagaacagcaagtgctcttaactgctgaatcatttctccagccccattcatgcatatttaaacagtgtatttaaaccaaacattatttaagccaacatatatgtctgcaaaattatgttttcattcaaggaaggtcagatccttgtgtaagtgggaaatccactgagccaccacatgcagagagtaaagctggagaaacttgaatcatctgggtggagaggaaggagtaacgggaacaggggtcaccctctgaagcagatacgatagtcactctatcctcaccggcccaggagttgcatttcactgtgcatttatatacaaggctttatgtgcttacagtttgagtttactcaattcatttattgcctcttttgtgctcaaccttcaatcttagcactagataatgtctgctctccagctgctgaagaaggggtgtgtcagttcataccccagaacacctccaattcctacttcctacctcttgacctttgtagttacaattcacactgctaggtctcagttcactcagaataaccgagtgcacagatatttattctgattctctgtctttactaccatgcacatggagacagacacagaacaaaacatctgagcagagttcctaagtctctcccggagaaattcagaagacgctcctaagcatgtggggcatctctgcatgtaaaacaagttgtgttttatggggtcagttaccaggatgccaatgccattttataggtccagcaggaaaagtgactgattttatatctatttccacttctggactcccagacataaaatggaacttacaggatagcatagcatgaaattgaagaaccatgttcaaagatggaaggtagaatctccactaaaaaaaatctgtatattttataaaaaataatacatacagacatcatggtatatggcccatatgctcacatattctcctacaactggactgacacacctcaaatggggaaatacatgggtctatagtacatttcatgtacttactcagccacattttaaccatttctatatatgtgtaggtatatatcttaggaagtttttagagcagtaggtttccatactttaaatgtctctagaattatttattatgctgtatagtccctcttctatcgtgtcccctcatcccaccataatgtatcccatcatgttccattattccccattagccctttataccatctctaacaacatcccaagggccttttactaattccttgtcctctgtgggaattttttaatgatttacttattcttttaagtttcattttacattccaaccacaattcttcctcatgaggagtcaacaaagtctgacacaatatgttgggcagggccaagcccctctcccatgtattaaggttcatcatggcattccaccatagtgaatggactccaacaagctagctcatgtaccagattcgtattgtagtcctactgccagaggcccctctgatagtccaaggttcacaactgtctcccacctatggagggcctagtatggtttcctggagtctctttcactgtcagtctagagttcatggagttccacgagcttggttcagctgtctctagatttctccatcatgatcttgatcttccttgctcatatattccctttcttcagctggactcacagagctcatcctggttcttggttgtgatctctgcatcatcaacaatcatcaattattggataaaggctctgtggtgatagttagggtagtctccaatctgataacaaaggaaggacagttcaggtaccctctccactattgctaggaatcttagctagggtcatccttgtggattcttgggaattatcctagcaccaggtttctccataaccccaaagtgactctctctattaagatatctctttcattgttctatggctattttaaaggaagccttatgtgaagatttaaagctgacctccataaatgagagaaaatatttgacattcatatttcttgatcagagctaccccatgccgaatgattgtttccacttcaatccattcacttgaggatttcataatttcatttttcttaacatctgcatagtattccactgtgtaaatataccatgtctccattgtccactcatcagttggtaaatacctaggctgcttccacttcctggatgttatgaaaagaaccattatgaaatctttcgggctttctgaccagtctcaatccaaccactccacagttttgtacctttgaagctggcacaggcttgaaggaatatgtctatgaatattgtctctggtggcatcagggctacctgagtagcaggtaagtatgtttgttctcatatgaaatgtttctatagccagtatttctaaagtaatctctaaaatgtactgatcaaaaggtgttcttataaatttagtgtaaggagtttactagtcaatctgccaaacaccttaccaactcttttgtgaaatgttctctccaaatgtaatatggccctaaaaaatgcccttcctcctcccctgctccacctatacattcagttcctctgataatatctaatccttttatttctaggctaagagaaactaactatactcttcataaaatatagtaaatgtaatcaattacgtgcaatatttaggattggtggctttgacaaagtaaggttcacccagagagagggggaagacagtctctatataacttgctgaattttaactgacttcggtactgattcagaataaacatatgtggcaatatgtgtttatttacagtaggacttgccttataaccccagatggccttaaattcatggttattcccatcatcctccaaattctggggttacaggagtgaatcactacaccacactgaacaggccttccctgccacatggtcctattatgatatattgttttaccacaggttgaaaagcaatagacaaactcaccatgaagagaaatttctacactgtgaatcaatgtaaacttcccctctttagaagttaattatttcaaattattccaagcagcttgtcttagtgacagaaagcagaattacacacttaaggtctgtgtcccatgaaaaatccctcccacagaacagtatgaatccaaaacaaagtaagatttttaaaaatacttataaatataaattttgacagaaaaaacttacaggataccctcaaagaataaaataataaatacatagaaaatcatgcgcgcgcgcgtgtgcacacacagtggggagagagagagacagagacagaaaaagtgaaacagagtcaaaggttaatactatcataaatctacaactgccctcttcagaaactaacctttaggatgggaggccaagtaaacaaggagagactgagggagagtataaggctccaacatcagcataaattcagtgtcttattggaaacgctggttgtggagctgctcctctaacttttgtatttcgggtacattctgattcatgaatgcaggtgcaaaccatgtggagaatggggtggcagaacactgggtctgccaaatgcatttgaagaacaggaagagaggtgttgagcacatgtgaagaagtaattatcacagtgggtcgtggtgtacatcatgaattcaagaggaaataataataatcagcaggagagaataaaacattgctagagtcaggtagccactattccaaattgaggtaagagtcaattttactagcaaccttgaaaggtatgaaagacattacatttgtgcttagggaaactaagactctaatatgctagtaatcttttctgaagtgaatatatagttagaaattaggaagactttaatcccaacctgaatattcaggctctgagtctgattccctgccctgatgtaattagctcccaggcctgttctgcaccaacttccctcctcagggaacaattctcaccaagggtcaattagaaatcccaaataactattagtcgaattctgtggcagctcatattttattttgatttttataccactataaatcccaattttacagaatcactgtttgctgctgtcagagagcacacttccctttaattgttttagttctgtcactccaagggtccatgctgtgaacagtagggaatatagatcacacttccagaatccattcatgctctctttcagtaatcccccatcctctttttatactcctttctgatgtgtcttcactcattttagactttcattttaagaacactaggaacagcctgtaattttgccatttcctggttctacacatcaaccccaaagtgccaaggagggccttctccagcagcctacgattctcagaatgtatggttttttgaatactttcctactccctgttaatgtttcaaagtcatcaacgtgaatgtgaactacatagatgtgtaatcatgactacatagcttcagacagcagtgctttggagccagttctgtacaaactggcacttattcttcagcaaatagcagtagtatgaacagataaaaatatctgtcgtattctaaaagctgacagaactgattaggaaactgttgcttaagtcagccgggtattattttaactgaggtcagagaatggtgaatggttccttagtcttccaggtcatgtgcagccttctttacagcatccatttgctaagactttaaacctttgggctttagaagatgctctctaggccaataacaccagtatttgcacctctcagaggacatttgccaagtatataaaatattaatcaagcaaattttccctaaacttatttttcagaaatagtgttattaaggaacagaagtttgttccaggaggaataaaataaagccttgttttaaaatttgagtacagggaagaagaaaggggggagaagaaaaagaggaatcaggaagactgagacaggaaaggaatagaggagagcaagaaaggagataccttgatagagggaaccagtataggtttagagtgaggtctggcactagggaaatgctcagggatccaaagggatgaccccaactaagaatctaggcagtagtggagaggctgactttgatgcccttcccctataatgagattgatgactaccttgcttgcctttcctagagccttcatccaggagctgatcaaagaagaatcaggcacccacagctaaacactgagccatactcctggaatcagttatagataaggaggaggggtgagcaaaggagccaagaccgtgccagagaaacccacagaaacagttgacctggtctagtgagggtacagaaaccctagtaataaagcttcggaaccagcattggacccaaaccaagccctctgaatttaggtgccagctaggaggccaagacagtctatgggacctctaacagtggagccagtgtttatccctagtacacaaatggactttgggagcccattccctatggaggggcactattgcagcccagataaacgaaagagggcctaggtcctcccccaaaggatgtgacagactttgatgatcccccgtggaaggactcagtatccttggggagttggtagggggcgtgggaggatgggagggagagggaactaagattgatatgtaaaataagattgtttctaaaataataataaaataaaatttgagtgcagaactctaactgtcctccatgtccaccctcactgtcccaaggatgatctgtgtttagaagatgcgcttatcttggtatttcttcattttcatttaaaaggccttatttggtctttttttgagacagggtatttcagtggctttggaggctgtcctggcacttgctctggagaccaggctggcctcgaactcacagacatgttcctgtctctgcctcccaagtgctgagattaaaggtatgtgccaccaccacccagctttggtcttatttttatttcagctattctacccaatagttttctcttccacttacttataagttctcaggagcttttgtactgggtttttgtctacagtaccgagtccctgccagttctagagaactcatttcatactgtctttctttttctcaagcccctggcacagtaaatgtgaaatactgcttcacagacactacagccattgcatctgtgtggtgaacacaatttaattgctgagagacaggcctactgtcagctactaaaacaaatccagtgacaattgtaaggtgagagaaacaaagaaatcccatatcacctgtttgcagatgaccatcataggaagtcaatgctagacaagggagatgtcatcagcagagacagatcagaattgacaagcaacacatctaaaaaagtaatgttgaaccacagatagaaaaataatataaagcacacatttcaaataaaagtgtatgaacacacaagagacccatctaaaagctcataccagtacaatgaacataaaattgtaagaaggaaatcacatcaaagaggtctagctaaatgtggctgaggtagaagatgcagtatacattactcaaggtttgaagtcattttttaaaagcgtacactgttccagtacctcagaccacctcttctataacacaaagtgttacgtggaaagtgagggatgattcaagttgtgtgaatggaagcaaccttatccactaccaacaaagtcagtaagtggccctcagttggaacatacaatacatactggtaacagactccaatgtccactgcagcacctcaggaagagttcagggatccaaagaagaacaatgaaccttatgagaaatctcggagtacccagatgcccactttggcaaatcgcatatgtcatgctctgcacaacttcagagactgacctaactagggcaacagggaatgaagaaaggacagatacacagacatatttaaagaaatgctgacattgggtgagctgtgttcactttgatggagagtaccagttgctgctgcagcaacccctatattcatcatgtttattttataatctgaatttagagtcaggtatcttgtatacagctgaaggaggaagcaggtttacctaatcttggagggagcctctgtaggggcagcctcaggctgtagttacccagatgaggaagctgtggttgataatttctgcacacactgacaatcatccctaaacatttgtaagtggaacaaaggaaggcttttctaattccctggacctgaccaggggaaggctttgccattccgatgcatctgaggcactggggcacttaacatggctgtgcttatgtcaacaatacactttcactcagtaattcatccactcatactttcatacagggcttcctccactccccacaaagaacaatttcactggtgaataacttggcaaagttgtgagcttgtttactgggcttgcttacagagcactggtaagaatttacttagagaagcacagatgaccacagccctgaaaagcctcaccccagcaagtgttgagatgactttctcacagctgcattaatggcctccccacttcaggtcacattctaccttctatgtattctggtacccctgagaccatatggctgtcctgtgctgtttgtttgcagaatcgaatacaggtggctgggaggtgcaggaggagccagctggacattcatgtgaaaataaataaccctcctcactcctccttttatgagacaacattaacatccataggcatggtcttagggggtcagttaaaatcagtcacatatgctctggtgaagacactctgcagtactcaggggatagaactctacagtcctcagtagtaatatttttttcattcatttcattaacaggacaaagcaagaaagaacttagcactatccaatacattatataccctcacaaagaggctgtctcaaaattaaccaccacaaatactgttttcaggaccagaagcaatgttcatctctttgtgcttttgttttctgctattttgcagtactggagtgagtgattctatttcacagggaagtgctctgtgatagttaatgagactttttataagctaggcatctttccaggcactctacatgtcttatgttatttaaggctagcaataagtctatggagaagatattattatctctagcttatagctttaaaaacagtaagacttccagtcaagagcagaaggcaattctgtgtctctaaaagctacatgcatgtgtatgtgtgcacatgcatacacacacacacacacacacacacacacacacacacacacacacacttacaaaagcctaaaagaccaatattataaatgtgcagccctactaaacatgtaaaagtaatacttcattgcagcttgaagagtagcaaaactaaagaccaaatgagtgggggaagaaaggtggcttgtaaatggccatactttatctaaatctctcacccaggtctctgtagtaaaggttccatctgtagtccatagcattactgaaaattggtagaaccttcaagaggagccacatagggaaaccttagatcattgaagtcttcaagtgaactttaaaaggtgggattacagtgccctgttttctctatttgcattctggccaaagactaatgttttgctatacaaaagttcctgtgatgatacaccccccctaaacaataaatacaccttgatcatggactgacacacctctaaagccaagagaccaactaagccttctctatgagttaatttatgtgctgatcagtttgcattcagtctatggagaggatatagcatcattgtggaaggtacaaccaagcaaatctactcacatcctggtgtcaacaaagcaaagaaagaatgaagtgaacagacacaagatacacccttctgggacaggcccatagtgaactgcttcctccaagttagtacctactctccaccacctcccaaaaatgtcattaacttctgactgcataaatacactaatccacttgtaggattagagctctggtgaaccagtcactttctgaagcccatcatctgtccatcaaacctataacacatgaggtcctcaggaaatccttcatctctaaagcataaaaatatactgcaagcatttattacagtgtcagaatatttacacaaagaagtatttactcagtcatcaaaaagaatgaggtcttgtcatttgtatcaaatgaacagaactggaaaatcttatgttaagggaagtaaaatgggcacaaaattcaaaaatcgaatattctctgctgtaggctgaatatagaaacattgactccaaagaataaagcaggatatgattgataaaaaggatgattgggaaggactatgggaggttgtataacagatatcaaaagacagctaaataggaagactatgacttattcctctatagagcagcaggttggctacagtttacattacccattatacacactgaaatgcaggaatatatagactcctaacactaagaaataataaatttataaggagctgtgaatgccaagtgcccctttcggattatctgtttgtcctgaattaccataaatatgtgcaattattacataccaactaaaattttaagtgaacatttaaaagctggactgatagcacaagattttaatctaagaactcaggaggaggagttcaaagacaaccttgttgacaaagtaagttccaggatagtccttaacaaccctaatagaagagaaagaggaacatcaagcacgtatttccaatatcaggaatgaaagcagataatcggtgcacattttatgttaataatttaacagaggtagggaatgaacagcccatgtgtgaggtcctgggttcaatctcctaggaaaatgtactggacaaacaccctgaaatgtagaatataacaaactaaagcaagaggtagcaggtaccctgaacaataatacatgtatcaaagaaattaacacataattaaaaatatcttgcctaggtgtctatattggtaaatttgattaatcaatatagaaaagacatttctatatactgttgaaatttttaagggggaaaaacacttttcaacttgctttagaacctgtgagagactaaagcacaaactaacaaaagcattgaagtaaagctacagtctaaaactctcatttacaaacatgtggaaatagctaacaaaatacagtaaagtcaacccaaaaaatacttaagagtttcatatattagaaaagggaaaagctattccatcaataaaggaaaagatatatagttatctcaataaacacaataaaatatttacctaaaatccaattatgtttcttcatctgaaaaattctccagaaaactagaagtcaaagaaagagcttccatttgatcagtttctacataaaacatctacactttttgtgatgattagtggtttaaaaaaatgtatcatctctaaagtcagagataaaggttaagtatatctggtctcagcatttctattcaacattgttctagcattcaccattaagtaccaaagttaaatagaatacatgaagattgagaaataaaacaaaactgtttttatttttaaattaaataaatatatacctagaaagttcaaatcattctaatgaaaaaaactattaaatctactacataaattcaaccaagtcctagaattgacactgacactttttaaaacaattctatttgtttatagtagcaacaaacacaaaaggtagtaaaaagttttaatcgatatgttttgcagaagcacaaaaaatgtctaaaatacctagaaataaatttaacagaatacagggaagcccactatttagaaaacttcagaatgttgctttgagaaactggaaaattaataggtcagaaggcatatacagtgctgacttagaagagtcaaagttatcaaaaatgtcatctgcccttatattgatccatagattcaatacaattcctgtcaacagccaaccacattcttgatagaaatttgaaagcaagtactaaaagttttatagaaatacaaacaatctacaataaaaaaagcagttcttaagctgatgggaacacagcttaattcttagtatatgaaactataataattaaaatggttttgtgatggcttagtcctgaagaatcatggtatcaccattttcttgtaattgaaacattccctcctgaaggttagaggcttgccaggcttaggaaactaagaaattatataaagctcagataggtcctagagttataaaatccccaagacctctccccaagttaagaaaagcagtaagcagttgctggggagaggagaccccctgtgagagcagttgttgaggggaggagatcctcatgaacattgatgctgcaaaagtactcaataaaaattcacaaaccaaatccaagaacacatcaaaaagatcatccaccatgatcaagtaggcttcatctcagagatacaggaatagttcaacatacaaaaatctgtcattgtaatccaccatataaacaatcttaaacaaaaaaccacatgataatctcactagatcctgaaaatgcctttggcaaaatccagcaccccttcatgtaaaagtattggagagatcagagctacaagggacatatctaaacataataaaggctatttacagcaggcctgtacctaacatcaaattaagcagagtgaaactcaaagcaattccactaaaaccaggaacaagacaaggctgtctactctctacatatatattcaaaacagtgcttgaagttctatgtagagcaataagagaaaaaaaaggagataaaaattggaaaggaagaagtcaaagtatcactatttgcagatgataccccccaaaaaaatctaccaggtcacttctatagctgataaacaccttcaatgaatccctgcatacaagattaactcaaaatatcagtagccctcctacttatgtgtacaaatgacaaacaatgagaaaaaaataaggtcaacacacccttcataatagggacaaataatataaaataccttaggataaatctaacctagcaagtgaaaaacctgcacgacaagaatttcaagtctttgaagaaagaaaatgaagatatatcagaagatggaatgatagcccatgatcatagattggtaggattaacatagtaaaaatagccatcttgccaaaaacaatccacagattcaatgtaatcaccatcaaaattccaatacaatttttatagactgtcccgcgcatgctctgtatttctcgccagcaagaaatcatacacgggacactcggatccttctgcaggaaagctttaatgcgtcttgagaggagagcataagcttaccagagcggagacgctgagccaagaatcccgtcccctaataaaggctggcagccgccgcctgggacgtgttaccctatgattggctgtagctcatccggccatatgacgccacggaataggcagagatcaaggaatggaaaattacccagcgcctgcgcaataatcttgtttacattcggtgcctgccggatgcaggcgccatcttgtaatggagaatgcagggacggctccctacatatccccctttttttattaattaatgataaggctttatatttttacaagcaaataggtcacccaaatgttgagggatagaggcagaggttgtaccttcccaaatcaaacaataagactgtgtacgagagtcgcgactaggctgttagcttgacccgaagcactctcgacctgtcctctgccgtttttctgggaaagggagactaggcaggtaacccttatgcaggacaacatgcctcccagagaagcctgcatattgggcaactctctgtgcgatgccttgctcgacatccctcatgggctgctcaagccaggcactctaccctgtgcaatgagcctaggctccgggtgtgcaagagctgtctggccagcggcctattgcttaagcatagttagccaaatatcagtggaagccccttgttccaaagctacaagcgcttgggcgataaccaccttgtctctcttagtttgagccctgagcctacagaccagccagagaagcaacaccaatccacagcaaatggctgcaccaaacaatcccatccccacccattccttaaaataggagacagctgaagcaatccatgatgacagtccctccgtcaaggacaggagttaatctggataatagcagctctcaactcccggggagagggtggagttccgacttttgagggtccaaaggggctcttcgggtgagtctttccgggatccacaggggattctcttcatcctgtggaaaaacacatatcgctcccctggatcttatgagaataggatccgggcctctccaaagaccagttaagacatctttccattttaccatctcctctgaggtatgacgcttggccgctgtatggccctgagcgtcggtgtttagaaaattaagggtaaagagtgccatggatattgcaactcttggcaccgagggtaaggatgctcccattccctccttttgtttgattaaataagacttaagtgtgcgatgggcacgttccacaatgccttgtataaggtaggccagttagatgggtaatttccatctgtctgcagaagtgctggaacttttgagaggtataagccggcccattatctgtttttaagaagcacacaggtggctaggtaaagtcttatttctgtaatacagctgaacttccttaaacagtagcttaacttctttctgaggcagggtttttctgtgactttggagcctgtcctggaattcgatctgccggaacaggcaggccttgaactcataaagatccatctgcctcttactcccgagtggtgggattaaaggcgtatgccaccaacgccctaaacttaaaggtgtgtgccaccaataccctgagcttaaaggtgtgtgttaccaacatnnnnnnnnnnnnnnnnnnnnnnnnnnnnnnnnnnnnnnnnnnnnnnnnnnnnnnnnnnnnnnnnnnnnnnnnnnnnnnnnnnnnnnnnnnnnnnnnnnnnnnnnnnnnnnnnnnnnnnnnnnnnnnnnnnnnnnnnnnnnnnnnnnnnnnnnnnnnnnnnnnnnnnnnnnnnnnnnnnnnnnnnnnnnnnnnnnnnnntacattcggtttctgatatgtaattctggacttctttaagattgtcccaagccaaagtccagaaaaatcatacctctccgaatttaccaccctgcagttctgaatccgcctcgttagaggggtctccgaggtgctggaaatgttcacatgttcccgggtttcggcaccatatgtaccgcgcacgctctgtatttctcgccaacaagaaatcatacacgggacactcggatccttctgcaggaaagctttaatgcgtcttgagaggagagcataagcttaccagagcggagaccccgagccaagaatcccgtcccctaataaaggctggcagccgccgcctcggacgtgtcaccccatgattggctgtagctcatccggccatatgacgccacggaataggcagagatcaaggaatggaaaattacccagcgcctgcgcaataatcttgtttacattcggtgcctgccggatgcaggcgccatcttgtaatggagaatgcagggacggctccctacaatagacattgaaataataatactgaacttcaaatggaaaaaaacacaatagctaaaacaatcctcatggggagtgtactgtgtatgtccatcttattgaatattgaataaaatactgtttggccaatgagagagcaagttagacaggactaggagtcaaagaggattctgggaaatgcagtagagaagtggtgatccatgcaggaagtgatatatgaaggagactcatatttaagcaagatgaaacaggaagtatcttttttccccttcctcctccagcagtgccatgtgagccaccagcaagagagggtgccagcgaaaggcatcctctataagataagtcttataaaatatataggtttatgataattaagactgagctaacagatgagaaatcctagtcattggtcaagcagcatttgtacctaatacaagtctctctgtgcattaattgggatcctaactcaggcttgcagctggtgtaaagcacacacatggtggtggggcttgggtggcttttggtggaaagatttatggaaacacaatcttgcaaaacttctgtacaacaaaagaacttctgtaaatatcattattgccaatttcaagctgaactacagaactatagtaataaaagtcacagggtatttgtatttaagttgatcaatggaatcaaaatcaaagactcaaacatgaatcctcacacctatggacacccaatttttgataaagaaaccagaaatatacaatggaaacaaaacacatctctaacaaatgttgatagtctaactggatatcagcatgtagaagaatgcaaatagatccatatctaccatcctgcataaagctcaagtccaagtgtatcaaaaatctgaacataaagccagataaaatttaacttgatagactagacagtgagaatagccttgaatgcattggcacaggagacaacttcctgagcagaacaccaatagctcaggcactcattaacaatttataaatgggatttcatgaaactgaaaagtttctataaggcaaaagatgctgccaactggacaaaatgatagcctacatagagaatggaaaaatattttcaccaaccccacatttgacagagggccaatatccaaaatacgtgaagaactcaagaaactagacatcaacaaaccaaaatccaatttaaaacagggtatagttgggcagtgatgcatgctattaatcccagcactttgtaggcagagacaggtgaatctctatgagttcaagtccagcctggtctacagagtgagttccaggatggccaagtctacacagagaaatttggtctcaaaaaatggtgaagtttcaacagaggaatctcaaatggctgaaaatgattaaagaaacactcaatatccttagccatcatggcaatgcaaatcaaaattactctgagagtccaccctacacttctcagaatgaaaaacacaagtgacctcatgcttgtaagactggagtaagggtaacactcttcccctgttagtgagagtgtagacttgctcagccattatggaaatcaatatggagattcctcagaaaattggaacttgatgtacctcaagactcagctataccactcctgacaaatacccagaagatgttccatcctttcacaaggacacttgctccattatgttcatagcagctttattcataatagccataaaattgaaaaaaactagatgtccctcaaccaaagaacatataaagaaaaaatctggtacatttacacaacggagtattactcctcggtttaaaaaatatcatgaaatttgcaaacaaatggatggaactagaaaaaaatatcatgggtgaggtaacccagacccagaaagacaaacatggaatgcattcacttataagtggataataaccgtaaagtaacagataatcatgctaccatccatagacccagaaagtcctagtaacaaagaggactcaatggggctagcatggatcttcctgggaaggggaaacagaatagatttgtggatggactggagacaggtggagatgggaacaggatggattaggtatagaggtggagggagagagtactgagagagataactagaattgaagtgcatttcagggatgatgttgaaaactcccagaaatccatgagagttaccctagataagactcctacaaatgggggctatgaaacttgaactggccatcttctataaccaagcaaggtttccagtggaggaactaggacaccaacccagcacaattccttcgacctacaagtggccctgcctgcatgggagtggccaaccaatgactggtccaaattgaaacccatgctatgagagggagtccataactaacattgcttagcagaccaggaaccagagactggataacccagacatcaaggatagaaccaaacatggttgtcaaacaaagaagaaaaaattcagtgaaatgattcttaatggtactatactcataggctagcataaccttcctcagagaggcttcatccagcaactgatgcaagcagatgcagagacccacaaccaaacattagacaaaggttggggaaaacagcccacagaatcaactaaccagggctcataggggctcacaaaaacagaaccaccatcaattatgggacttgtatatgtctgaccgaggccttctgaacatgttatggttgtgtagctttgtgttcctgtggaactcctaacaggggaagcagccactgtttctgactttttcctacttttggaacccttttcctcttactggattgtctcattctgccttaatatgaggaaatgtgtctagatttattttaccttgatatgccatgtttagttgatatccctaggaggcttgcccttttctgaaagggaaggagtggatctgggggaaagaagacagggatggcttggaggagaggagggatgtagtatatgaaagaagaataaaaaagaaagagcaagaataaaaacagtgactgggtagaaatcataattatttcatactatcaaatagttgcatatattaacttacatactagattactataaagaagatataaaagctgaaatgagcaaaaggaaaaattcaatatcaacctccctttaactcatcactctaatggctggttccaaattgctgcttagggctgagctggtagcaatagtattaacatgacagtcttcctagtcattgtcatcccaccatgaactggtgaaagaaagggttgtctcagttagggtttctattgctatgatgaaaggccatgaccaaaagcaaattggaaaggaaagggattatttgacttacactttcagttcatagtccattattggaggaagtcagcacaggaacacaagcacaactgggacctggaggcaggaggccaagatgggtactgctcagcctgctttcttatagaacacaggaccatcagcccaggcatggccccagccacaatgggctgggccctcccccattaatcacaaattaagaaaatgccttacagctggatctcatggcagtatttcctcaactgagacttcttcccctgatgattccagcttgggtcaagttgacagaaaaccagctagtaaaaggagtgcatatggcagatgtgcacattcactatggaattagcatgtgtcatgcccactcatacttcatgggcaatggttagcttacaagctgcaatggccaccagggagcctggaatcacctgtctagcaagcacagtgcagctgcaatttaagcaaaaggaaagaggttttggtggatagcttgcatgttttgctgcatgtggatttgccagaatttattgcaatttttctctaacactggctctgtatttatttgtccttactactagtgttgttatttacactaattacaggaaatggaaataagattcaataaacaggttcactttgctcttctctgcaggctgtgactcaactccttgcattttcattaggacataggtaagcaggctccaatttttcccatcattcctgaatcagcaatggctataatctgatgtgattgctctttcctgtgcctctctgctgaatttaaaattatagctcatcactaattttaatttacttttctgtgaccaccagaaactttccaattctgttatatacttagttgcatgtatttgtctctgaattagtgctttgtctcccctgcctacttctcaacaagctaatttgtctttctgctattggctttatcttgctgaatttacatttctaaaaatgaaaatacaaaatattttgtagccttgaaaacattgcctttcagatttatcttcccatccctctctctatttcatgaaaatcaccagctctaacatattctacagggcaatgtctcaagcatgccagaacgtccctgtgttctcctgtaaatcttaccatgtaatcctgggcttagcctgactttacaaacagaataatggatactgcatgctaacatttcatttaacagttttaaaatctgtccacaaaaattaggtatcaacaagtcttcttgtcaagaaacacaaaatcctcctcctcctaagactctaccatgccagcacacaaactgcagaggactctgattcctgtgggagaagagtgctcgattctccagtaaggaaacacaaggcctccagtcaaacatagtgtgtggatttgagattgatatgctaggcatttgacaaacttaatttgttccccaaggatatgtaatcagcattgcaaaatttctcatacagctctggggtgagtttgcataatcttccattcaacattcaggaaaatgcatcagtggagtacatccctgagacaaaataactatgtctacctttctttagagtgctcagagaagtttacaagccagaattgagccagagagcatttatgaggctctgaggtgagggcaaaccagttttctttttaatgcacaaagagcagggtaagaactgctaaagaggcaatgaaatagctagttacaaacggaagtgctgatgtcaggaaagactccagccatgactgctcttctatcctggtcatttaagagggaggactgctcaggctcttctcttaacacctgcaagcagcacaaagaccctgtgccaggccagtcatcagataataggacaatatcactccagtgagctccagtcttattccttgcaagacacttcactcaaaaagagacaggaaaattaaaatctccttgcaaggcttgttatctctttctgagaagatgataagactcaagtttgaagtgctattaaaaattggattaagaataatttgacttaagtaggaatatcattttagtttctctatgaagatatgaaaaggggcaatatttagaatggctgacagaattcaatacacattttaaaatatgtacaattagtagaagatagttttcttcccaaacagttagaattttgctacatttaactattgtaataactatatatataactaacattaagaatggtaacaatcaatgaagcagtactctaaatgactgtggtatacttgcaaattttataaaatatattgacactgaagtatttatttagttgtaggcatcttagaatgtgtttttctttaatgtttccttcaaagactgtagaaataacttacttatcaagtcttctaatgtcttccaagatattactcatcctactagatatcagagaaagcctgtaggttctgccctcaaaagcacctccctctgcattatttgttaagttttcgtctttcctctctcatcctggcgcattctgcattgtgctgggcctcctgtcttccctggtaattttttaggacattttcccaccaacaagcaaatttgacaacaccactatcaaaactgacatttaccctttacagacaaaataaaatcaacacctctcagatgagttataaaatctcatttgacaatataatcagtgtctaattcctgcatctgtattttctatacttcttatgtattatttgttttctgagatggtgtcaggtatcccaggttggcctggaagttgctatgtaactgggaatcctcttgcacttcttatccccctgccttacctccttcaggctgggatacttggcaggtgtcaccaaacccagttttatgcagtttggatcaaacatggggcttcatataagctagtggctgctctatcaaccaaggtatatcccctgcattgtctgttttgttttgaacattatcttcagttatgtacaaatccgcaagtagactattgagaatttgttcctaaaataataaaatattttagatatactatctatgacaatggaaagctttcctggcatagtaacattttactagcaaactgaccatactaatgctgtaggaacccaacaggctttaggattaggcaggttgtaaacaaatacaaatcaatgtattactcaataagaaaaaaatgatattctatgttttctgggttattctataaggaataaaacatacatagtaatcaagaaagagatttgcattaaagtcactttgatcgtatgttaaacttgtcttctttccatcaacagtgagataaacgtttccaacataaactcttagattccccttttcctagatagcgaagtaactgagctattttaagattcatgtctattctagcttttcaacttcctgaagcgagaagggtttaagaaacattctctcactttagagttttaattttggccattgcagtcacattcctttaacaaaggtttcttttttgggccctgttatgcatgactcccattcaaggttttatgttctaatctgacgtaatttaatttagtacaactccactatcagcactatgagatggggaacatttcatttttaacaaccatgtaaccatttttaaactcttaaatgctttaacgttttttctttaagtaatgatttcccagaatagccctttagtcatagttaagctttgctcttagaaatgtgtggagactggaaatagtccaaagaggagcagtcaaaatgaataaaggagcagaaaataaattatctcagaaaaagttggagttaaaaatggaaagcaaaagtattatatagtgggtctatttcacccaactcttgcaactcaaagttaatgggtttgcgaaactgccgtggaaagatgagcacacaaacccacagacacacaacacacatacactctcacacatttccaaaccacaaggagcaagaagcccccaagttctatcattaaccttgtgatcttccttgaaacttgagatctagaaatattccacaacatttgagctcactttaatcaggtagtaggaatggatattctgaggattgtttcacttcacttccagaaggacctctttaaaattatttacttgagttttaattacacatctagctgtgcattattaagacactctgatgtctgtgaaagtcatgtgacactcagtacctgctatttccaagggaaaaggagatcaaagcaaaactgtcctaccttctcatctcaagcaaacacaagtccttaatccctagcagcagaagatacagagatggagaagagctggagtgtctccctaggaggcagggaatcaccagaaccaaggaaaaacagtcccgacaaatggcctctgactttctgttggattcactctatggaagtactggccaataataggccacgagtaaacatgattaagactttagttcctcaattcaattcctgctatacagtggagattagctgattgatctcacatgtatccattgttcctctcatgatcgttccccatgtcagtagcccctatgaacatttcacctccttgataactgctcctaacatctattaggcctgagcactgcagtctgccatattgggcacagctttgggcataactttgcaagtagtcccgttgctaaactctactcaaattacccagttcaaattgccacaaactgaaattatctggggtcatgatggtgcagcacaccactcctagttttaaaattgtaccatatactcaatgaacatggacacatacacaaactttcccctaagctggaaaattgtgttttatctacaatccattgtactgttgaacaagaaaagaaacccaaaaataaaaataaacttcactggggggtgttgggggagttagagagagagatgtgggtagatatgattgtgtttaattgtatagacgtatgaaattatgaagaataaagaaaaatataaaaaagaaagaataattaaaatagacttcataaggtgttatgttgactaacacaaacattagctctcatttagttttgtatatctcaagatgaccctgtttacaaagctgatcattgcttaggaaagctctcagacttgtcttttgaagtattaaggaatatattgattattaagattaagtaattaagattaaatcttggtgcttttctgataattcccataaggattaagcttccaagtttgtccacattcatcaatgtgctgaactactagttccagttaatacacatctaggcaacacattgaaaataagatgttgtagaaaagtaaaatcccaaaatggaatgaaatggaaaagtcataattcccctggctctcctcccccagaaagttcaacagcaggtatgctaagagggtaaccatgaacccatgtctgctacttgcctctcagaaaagtcagtgatttgaggaaatgctgtagagatggtggagagaggaatgaaaacatttgtgtgcatctgtgtggatgaactcagcccagtatgagtttgagggcaacttgcaggaggcagttctctccttctaccaagtggattccaaagatagaactagggttgtcaggcttggcagctatacttgcttagccaccttgtccgccttcaactcttccttaatgttcctatccagtgtactttccactcccttcaatgaaactgaatggtgcacaacaatggcatctgagtccctaatgtgctgtgagcatttagggaaccttgtagtaggccaagcactttttgagaatcacttgtgactcataatcatccctgtgatgagctgtagatactaataaaacaaagagaatgcagacaagtgaagcagaggagactccatgaattattcagttaggtgtcttggcagactaacattctaacctcggatttaaaaacacttgagccttcctttcaaagattctacaggctcataaactctggcagtttttactagtacacattacataactcttctcagttagagcaaactgttatgggaagagtctacttataatatttgtatcttctagactagcagtgtggtagttctttacagtgtgtactgggtaaatgaaaaagataaatatcctttaacatttgtttttaaaaaaaaaaagtgaacaagataaaggaaccatgtagaaagtgcatcctcgccaatacacacacccgaagtgttacaaccatcccttaatctcacaagagatctagctgaaacttagttctcttgataataaatcttgagctatctaattctgaaccattaccaatggcagttaagtgcctgtctgtgcatttgaaaccaagctctgaagatcaataaaactcaaattgctttttaaaaagagattctacccacatttttaaatacttcaaaagcaagatcaggatcacaggttgagcacaaaaacagaaaaacactaaagattcccaaagcagtctccccacagaaatgagtttacactcaggcaacagccaaactaagaagggacacaactgcttcccaaaccaacatcagaggagaatgcacttcctccatgcagggctgaattcacacacactcaatgctttaagccctcaaatcacactctaaataaatgcttttcctaataataatctacctcattgtcatccccaagcccagtcccaaaagaatgacaactgcacctgattgtactgtcagcagctaagagagaacctgtgagtcagtcggcatgtaaaggaaaaataaatttaaggaatggatgctgtaatctgaaaaagggggctgttcttccagtgtgttcaaaagagaagacacattgtgggcgggagtcgcccagatatccaatgaatctcactttcacatttataacatctctcacattcttttaatttttctgtttcaattttaatctcttaatacatatattatgcatgttttgaattatttatccttgtggaaaggagtatgcaagaccatgtggaaggagtaacatgccagttcccctcttcacaccctgtggacagatctttcagtgaccctggaacactacacccattttcagctagacttgttcagcatgcccagtgaccattctgtctctgccacaaatcccacagcatggagttcactcagaggttcacactggctgtgtgcagccatgtccaggtttatacttggttgcatgggatctgaactcaggtacctgtgctggctcactgatcattctagccatctctctagccccatctccatttaacatacatagggaaatgactaacaaaatcaagcaaattcaaataccatggcctcttaatactccacagcagtttgaagtatttttcccttgatgtactacaatagttctcacattatggaaactatcttgggaagcattttttaaaaaaaacttaaggagctaaaagaggttcctagacctattaattagcatcttagatggcagaaatatgaaatgataacgacctgaattaaaggatttagagagagcattttaacgagaaagataatctttctctccacctgggacaactcatataccacctgttatgctgcagggttatttgctgttctcctttcattctctgaagtgttttgtttgggtaatggattgtagtgctctaattacagctcactaatgataaagatcccatgtcgttcataattgcttgtggcctcactatttttcttaactatttatcttacttttcagacttcctttcctattgtgcatttattttatcatcaataaagtaagtgggccataaaataaatttatttattatcacaacaaattgtcatgtttttataaaggtggacttttgatctgtttaaacctgtgcaaataaagatcacgaagatgataaaattttataagatatggcatgacagaaaacacccattagaaaattcggtatcaatttatgcctaaagtagattgctcaaaatatataattatccctagcttcttttaaacaaagcaatcttttcagactgcaatcttaaggccaattttcccacaaaattaaggactccacagcacacttgatccattcatttgaactacctcagccatccatgcagctctctccaaagtcaatgaggccgtgaaatcagtattgaccataaaaacaattgaaattaatgaatcaggctcataataaaattgtatgcctgacccagagtcggcagagaaatggataatcattttgaatgtacctttacaaagatggccctataggtctgtcatgaggaatttttcataaacttgtttaacagcaaagggcatagaccacttcattcattcccattcatttcttcactcttgtataaactctatttttataatatcataatcaatgtgaaatgctctaggcaatgaagaaagcagaggccctactagctcacaagacaacagagaagatataaaacacacgtgtcaaagagaaatatactttaaatatggcccaggtacttgttcaggaaatcaggagacagatataaacacctaactccagcagtgtgaaatactctgggaggcacatggtttgaaggcttgttccagaaggtgctgtgtggggggactgtggaaactggagatggtgggagacagctacagggagtattagaagtcacacaaggcagggatcttgtcgctggctacttcttttctgactctctgaggtgaattatacatgaagtgaccagctcttctctgtcacaaatccctgctgtggtgattcctatacaagcacaaggaaccaaacaaacatgaactgcatcctctgaaaccatgagtcaaagaaatcacttttttgtttcttccaggtatctggtcagtcacacaaaagcctggcacatgtcattcagcatccaactccacccacccagcttgcctctctctgtaccttcccctgaaagtctaccttcccctatatccagcgactagattcagtagccatgacctcacatcttcataggaatcctctgactgctgtgccctcgacatttatcttattccatggctccatattctctgagattcagcttaagcatttgtggcgtccagctctggcaagtgccacctttgaagtttgtcatttgttttttgtaagtttaatgctatatttacttaggatttcctggcatctagttccatacataccacagacatttattgaatgaatatatagaaatttgaatatctagcaatagttataggcatacagttagcacaaataaatagaagttagtttttttataattatactgtccatgtgctttcaaaattccccatctacatatgtaacagaaagaaaaaaaaacatattctcaaattaaaagctgtagttgagtggtgtcttatttataatggcaagagtgtgtataatctgaatgtctgactagaatgttatttagcagtataaaggaattaatccctgattcccacagcattgctgatgattctcaaaaccatgaagctaaacacaagaagcacagtgtgaagacagtgaaaccagtctgaactacagtgtgagaattagccaggaaaaccagtctgaactacagtgtgagaattagcccagttgttgcctgtatacacatgaacagcataaggacttagtgagttatcaaaaaatgaaagaagaaagcatagaattgagggagggatgtcttatggggattcaggaagagttagaagagtgaaacaggtattgaatatattttgttgtattgtgtaaaaattttgcaaacaataaaaaactattttggtggtgaagttttatcagatttttagtatatttaagttttattgacttggtttctcattttaaagaaatactagtttaaacttaattttttgatatgaagatatataatatatactaagatacacataatatgcaattatatattaagttaaagcaagtatctatttaaatgagaagacaagctattaaaacatgaacatatttttgtttctttgcttttgatttggaagggggttgttctgtttttagtttttagttttttgttttttgggtttttttttttatcaagacaaggtttcttggtgtagtcttagctaacctagaactatctctatagaccaggttggcctcaaactcagagatctacctgcctttgcctcccaagtcctgggattaaaggcatgcaccaccaacacctagttaaacaataagcacctcaaaatacagtctgaaaagtcacataagatttttattatatatttctagaatattcattttccttcaattttttgctacatagacattgattaagtttttgttgaataaggattttgtagtgtgctttctagagaatgaaaaggtaacttgatattttctctaactagagagtctcttttgacattgctgtgtgttggcaaagtcatgtgaccttataaggtgttggaggaaaacctttaaccaccactttacaaccagaataatctctaactacactctaaatatttgtccttatacccacagataaatgtagtcctctccctcatcaacggaatgtctttgcaataatcagagaccattataaaaaattacagccaatcaaaatgcagagttgtggatcccagacccaagaggtagatctacaaaagactcccacacataaggcttgggaacattggagaagagggattaggaagattgtttagagccagaaaactgggaagtttgctgtaagactgttttctggtaattcagaagcaacacccacaaaacctcaccaacatggctgcctaaacatgagctgaacaaggacaaccacagacatgccaaagtggatgaggaaagacagtaaggactcaatcctatacagaaaactgaaggcagcaggcaaagtgattctgagagtaggagaaatggtcctccccagggaaggacacaccaattggctatccagcaccaaatggtcagccctgaaaatatacatacaagtaacaatatgcagaataagcagcatattttatgtatttagaaatatacctatatataaatagacatgtatgtctatagcaataattaatgataaaaggaccatgaatttgaaagggaacaaggagggatgtctaggaggaattaaagggaggaaatggaaaggggaaatgatgtaattatattataatctcaaaaaacaaaagcaagttctttttaagtttgtcaattttagtaagtagttataattctttcactcctgagctcttacagactcacatgttgctaaaatatgcctttatattttacaaatttcaatactattttatgaattcctgcttaaatctttaaagcatcgtgtacatgtgactgtgtgttctactgaaaagcacagcagtaagatgagtcatttggcctgaacaagggagagcacatcgaccccagatgctgtccaggaggcctgtacaagactgatccagaccccagaacatggatgtcaataaggaggcctctgcactccagggagcctctggtagtggattagtatttttccctggtgcaagaagggactttgagagcccatcccatatgaagggttacactctggccctggacacatggggaagggcccaggatcagcataggcagacttggtggactttgctgagctcccgttgagggccctaccctgccccaaaaaaaaaagatgagtcatttgaccagatgtcagtgaaccagaatcctctgcctctacctaaaactgaactcagcctcatatctaagaatactacctactagcccaacactgacttccattttcaagttatctctttttcccaccacacactccatgtactaagaaccacaggaggcttacttagtaagaccctgagacctgtagctgtgagttcattttttctgaacttatccaggatgagcagttgtagagactataagttagaacctatgcatgctctaatcactggcacaaacttatgcatgccaagagttgacttaacatcacacaaatattctaccatacccaaactatgtcaaaaaatgccaccattttatcttagatttcaaaatactctccactggcatcgcatgctcctgacacggggtgaggaggacaaacccaaaggaggaataggaaggggtcatgggctgagcaattggttttccagttgacaaagcttacaattttttataaatatgatcatagtaacatacgactgagggtcatctgtcagctgcacagtgatcgttatcttcaacataagtggcagcatttatcatccagtcattcaacaaatattttcatactagtcctttaattctgatcattggagaggaatttccactagagataacctaaactttatatcaaataagaaaaaaattacaaagagatttttctggactcatggacttggtaacttttagtgaaattcattgagaagctgtgtaattctaaattgatagtgtaagtccaaatgtttcatacaagacacttaggaagtccaaagaatgagtttcttctctggtttcagtcatgacaggtacattatatctgccaaacacccgaacatttcacatgcatcttacctcaagctcataacagctacacaaaaacactgaaaaacaaagtacttgctatgtggcaagggaaatatatttttggtgatgtgaaatccaggaacaatgttcttcaaatagcttagggaaggaaatgaactgcttgctgaaaagatttttctagcaagcatttctctggagggtagatagcaatctatataaacaatatagatatgcaacacatactttcatagttctggggaaaaggtcttcctctgagattgtaaactggttgacatgaagctgataaactgattgattatttggaagaaactagactgcatgaaataagccaatatttgcaatatcctggttttcacactttggtgtgactctggaagatactgtgctctccaacacatatttttatggctttatcggtagctttatttcttgaaatctaaagaatttgtttgatttttgcctttggtaaatgtagtaagcaaagtgtattagatattctatccccaaaatgtgaactagctctgaaaaccacaaatattcacatcaaacaataacacaaaatgtaaatggttcatactgcaccaattataaagacttagaagtgtgaaaaatatgagatgacaagtttttcttcctcctttttggcacatctgtttccatctccttccatccatgggattatgtatggcctgtatgaattcttcctgttctagcaccattcagtgctgatcaccattgccacaactccaccccacaccctgaccatcattagacctacacaggggtggtgaaactcaggatgacataggtgaaggaacatggacaataatttcagttttatttacaaaattcagtagagagtgggcacaaaacatcatggaagcttttctccatcatactctgaacctcatcctccagaattccttcttgctcttgagacagccacagccctcctcttctcaagctacaagatcgctggtgttatttctatttcattctcatccacaatctattcttcttccttccacaataaccctttagtgtctctagtagaagggttctagtttttaacttaggagcaaacatattgaattagtctttggcaatgattctgcatcattctctgttcctaggagaacacctctccccctcaagcttcccagatgtgcctagacctgaatcccaaggagagcagacttgattgtcaaagaagagccactttgcactatgacaaaaattgagataaaataaccttgatgaataatggtaataataaaaattatggaaataagttatttgtgaaataagaagagcttgtgtataaagaactttcaaattttcactaaaatttatcaagactaaaacacatttttagtattataatttaaaaaatactatacacaaataaggatgtcttaaaagcctacccatatgtctatgcaccacaaatgtgcgggtgctcatagaaactagaagatccccaaggtactggtgttaacagatggttgtaagctgtcctgtggataccaggaactaaacccaggtcctttagacaagtagtcagtactcttaataactgagccatcactccagcctggtttattaccctttaataaatatctgttctttaaagttccatttcttctcacaaaactacaatgcaccgcaacctgaaaagaaaataatgttacctcatagagaacagctaatacatcttaagtcaataccgaatctcaccctttatgaaaaaaatatcacacaattgctcttcttttttttgtatgttatgcaacaatgttatctgcatccaaaacactaataacaaaaggaattcagtggggcctgtcagcacgggcctgtgtcccaactccttggaaagctaaagcagcagaatagcaagttcaaagcttgcctgggctaagactagattcatgggcaatctagaaatcttaagaagacactgtatcacaaattaaaatgtgagtttgaagaattggctccatggttaagacacttactgatcttgcataggaccagacatcaggtcccagcatttataaccatctgttactctggttctagaggacaaaacactttcttctggcttctgcaggcactgggcacatacaagggagacaaacatgtatgcaaacaaaacattaataacataaaatatatatctttaaggcactaaaatagagtcaagcagaatgctggtcttgaatgcctgagaccccaggttcactgtccattgccacaaaataattttcaaaattggtcatatttctgtttccagatgaaaatgtatgaaaaggatgacatgggtatatttaaattttccataggaaaatatgaagcttctgctttaggtatccacaaactctggtatttatcttcatttctatatttcaattgagttttgtggctgtagcatctcagaatgaaaattccatctagaatttatatttgaaaagtccatggcacaaagggtaaaagcttgcaaagcatactgcttttattctcccatcaggagatgagctgcttagtttccgtcaacttaacaaagcagagtcacctcagaagagggaccctcatttgaagaacaacctccatcagatttgcctgtggcaatgtctatgacacattttcttaattgctaatcccaggagggcccataccaatgtgggtccatgactgcaaggccaaggttagataagaaggcagtgtgagcaaggcatggagagcaagccaataagcaatgttcctccacagtctctgcttcagttcctgcgtagagcttgtgcccaggcttccctcaagtattgactataacctgtaagctgaaatagtgttttgtcatagcaacagaaacaaaactacaacagcagatgttattgaaactgattctacaataatcaattgcaggatagcatcaacaattttctaagagtttgcataaaacaagaaaaattaatgagatgaaatgaaatgaacactatattgtttgttttaacttctgtgtatgtatagtatgtgtgcacatatgtgtacatgtgggaccagagatcaatgtctactgccttcctccatcactcctcattttatatgttgaatcaaggtccttcactaaagccagcattctcactgctatctagactgtctgatcatgagttctggggagcctcctatctctatcttcattgccataagttataacacagagaaagatgtttgacattttctacacaggttctaaacatcagaaccaaggtccttcagctcgaacaactaactgacccatttactcaactcctaggaatatgttaattcatgtaaatgaatcaattcatattttcccaaggaaatcagtgaattattacagacataatatacatgatatataagacacttgaaataaagattccacttaatttttgacatactagtgtaaaagaggagtgattagcctggttagcaagtgaaaaaaaccaagacttataactagttcacatcatcctactgggtgatgtgacagctaagtagcaaagctggggtttgtcagactctgaattcaggacagaggttcaccttctacactgcctataaaaacatgaaccctgaggaggtaatcaaaaggtctctgaagttaactgctgttatgctttgaattattatacaagttgcaaagcccattggtgagcaaaagctttttgagacccacaacacaaggttaatagagagctgcttctctattggtttccactgcattgatgtgttgacttcagcacatttggtaaataccctcaagttcctgtgttagtatttgctaaatactgtgttcaacacagaagtcccactgagagtcctctggtacagtgttctcattgatcacttttcctaaaaaatacaataatgagatctcacaccattgataggcattagtaaagcaaagatggtgaaatttgataccatgtttctaagactataaactcagaatgaatcctttgggtccccctccctcattcattcattaacccattctgctggctcattccttcactaaacagaatttatcaagctcttcctacatgcctgacaaagtttctatgagaaaaaaagtctcatctatgtttacagagcattatagatcagagaagtcttgagttggaggagtcattaccaactctctccccacagaggttaagaaggttggctacatccttctagctccatctgttgcgctatcaggcatccctcaccacacaactactcttctctgtggccactgctgagattacaggagtaattggttctggctcagagcattggatttccttgttatgtgaccacctaccctttattaaatgttcctcatgaatctgagaacatgtgccagatattatttgccttaacctggtacatagagctggatctcctatcagtggcttctcaagagttcttgattccctatatgtctcgagaaccatgctattgtttagatagaaaatgtcctcctcaggccttgtgtatttggagatttcattctgtagcactatttgggagattatataacctttgggacatggatcaaacagaaagccaaaagtttgaaccttgagggttatatactaaccccacttctaacccaagcaacagctgcttccttatccaacaaaccagaagccacacaagaagctcatgctgccactgatggagtccatctgacaagtcttcctccttaacatgctagactgtagctctttaaaactgtgagccaacatcagcctttcctcctttaaactgctttctgtcaggtgtttttcataatgatgaagaaagtaactagtatgcttttacacgtgacttaggacacacacacatacacacacacacacacacacacacacacacacnnnnnnnnnnnnnnnnnnnnnnnnnnnnnnnnnnnnnnnnnnnnnnnnnnnnnnnnnnnnnnnnnnnnnnnnnnnnnnnnnnnnnnnnnnnnnnnnnnnnnnnnnnnnnnnnnnnnnnnnnnnnnnnnnnnnnnnnnnnnnnnnnnnnnnnnnnnnnnnnnnnnnnnnnnnnnnnnnnnnnnnnnnnnnnnnnnnnnnnnnnnnnnnnnnnnnnnnnnnnnnnnnnnnnnnnnnnnnnnnnnnnnnnnnnnnnnnnnnnnnnnnnnnnnnnnnnnnnnnnnnnnnnnnnnnnnnnnnnnnnnnnnnnnnnnnnnnnnnnnnnnnnnnnnnnnnnnnnnnnnnnnnnnnnnnnnnnnnnnnnnnnnnnnnnnnnnnnnnnnnnnnnnnnnnnnnnnnnnnnnnnnnnnnnnnnnnnnnnnnnnnnnnnnnnnnnnnnnnnnnnnnnnnnnnnnnnnnnnnnnnnnnnnnnnnnnnnnnnnnnnnnnnnnnnnnnnnnnnnnnnnnnnnnnnnnnnnnnnnnnnnnnnnnnnnnnnnnnnnnnnnnnnnnnnnnnnnnnnnnnnnnnnnnnnnnnnnnnnnnnnnnnnnnnnnnnnnnnnnnnnnnnnnnnnnnnnnnnnnnnnnnnnnnnnnnnnnnnnnnnnnnnnnnnnnnnnnnnnnnnnnnnnnnnnnnnnnnnnnnnnnnnnnnnnnnnnnnnnnnnnnnnnnnnnnnnnnnnnnnnnnnnnnnnnnnnnnnnnnnnnnnnnnnnnnnnnnnnnnnnnnnnnnnnnnnnnnnnnnnnnnnnnnnnnnnnnnnnnnnnnnnnnnnnnnnnnnnnnnnnnnnnnnnnnnnnnnnnnnnnnnnnnnnnnnnnnnnnnnnnnnnnnnnnnnnnnnnnnnnnnnnnnnnnnnnnnnnnnnnnnnnnnnnnnnnnnnnnnnnnnnnnnnnnnnnnnnnnnnnnnnnnnnnnnnnnnnnnnnnnnnnnnnnnnnnnnnnnnnnnnnnnnnnnnnnnnnnnnnnnnnnnnnnnnnnnnnnnnnnnnnnnnnnnnnnnnnnnnnnnnnnnnnnnnnnnnnnnnnnnnnnnnnnnnnnnnnnnnnnnnnnnnnnnnnnnnnnnnnnnnnnnnnnnnnnnnnnnnnnnnnnnnnnnnnnnnnnnnnnnnnnnnnnnnnnnnnnnnnnnnnnnnnnnnnnnnnnnnnnnnnnnnnnnnnnnnnnnnnnnnnnnnnnnnnnnnnnnnnnnnnnnnnnnnnnnnnnnnnnnnnnnnnnnnnnnnnnnnnnnnnnnnnnnnnnnnnnnnnnnnnnnnnnnnnnnnnnnnnnnnnnnnnnnnnnnnnnnnnnnnnnnnnnnnnnnnnnnnnnnnnnnnnnnnnnnnnnnnnnnnnnnnnnnnnnnnnnnnnnnnnnnnnnnnnnnnnnnnnnnnnnnnnnnnnnnnnnnnnnnnnnnnnnnnnnnnnnnnnnnnnnnnnnnnnnnnnnnnnnnnnnnnnnnnnnnnnnnnnnnnnnnnnnnnnnnnnnnnnnnnnnnnnnnnnnnnnnnnnnnnnnnnnnnnnnnnnnnnnnnnnnnnnnnnnnnnnnnnnnnnnnnnnnnnnnnnnnnnnnnnnnnnnnnnnnnnnnnnnnnnnnnnnnnnnnnnnnnnnnnnnnnnnnnnnnnnnnnnnnnnnnnnnnnnnnnnnnnnnnnnnnnnnnnnnnnnnnnnnnnnnnnnnnnnnnnnnnnnnnnnnnnnnnnnnnnnnnnnnnnnnnnnnnnnnnnnnnnnnnnnnnnnnnnnnnnnnnnnnnnnnnnnnnnnnnnnnnnnnnnnnnnnnnnnnnnnnnnnnnnnnnnnnnnnnnnnnnnnnnnnnnnnnnnnnnnnnnnnnnnnnnnnnnnnnnnnnnnnnnnnnnnnnnnnnnnnnnnnnnnnnnnnnnnnnnnnnnnnnnnnnnnnnnnnnnnnnnnnnnnnnnnnnnnnnnnnnnnnnnnnnnnnnnnnnnnnnnnnnnnnnnnnnnnnnnnnnnnnnnnnnnnnnnnnnnnnnnnnnnnnnnnnnnnnnnnnnnnnnnnnnnnnnnnnnnnnnnnnnnnnnnnnnnnnnnnnnnnnnnnnnnnnnnnnnnnnnnnnnnnnnnnnnnnnnnnnnnnnnnnnnnnnnnnnnnnnnnnnnnnnnnnnnnnnnnnnnnnnnnnnnnnnnnnnnnnnnnnnnnnnnnnnnnnnnnnnnnnnnnnnnnnnnnnnnnnnnnnnnnnnnnnnnnnnnnnnnnnnnnnnnnnnnnnnnnnnnnnnnnnnnnnnnnnnnnnnnnnnnnnnnnnnnnnnnnnnnnnnnnnnnnnnnnnnnnnnnnnnnnnnnnnnnnnnnnnnnnnnnnnnnnnnnnnnnnnnnnnnnnnnnnnnnnnnnnnnnnnnnnnnnnnnnnnnnnnnnnnnnnnnnnnnnnnnnnnnnnnnnnnnnnnnnnnnnnnnnnnnnnnnnnnnnnnnnnnnnnnnnnnnnnnnnnnnnnnnnnnnnnnnnnnnnnnnnnnnnnnnnnnnnnnnnnnnnnnnnnnnnnnnnnnnnnnnnnnnnnnnnnnnnnnnnnnnnnnnnnnnnnnnnnnnnnnnnnnnnnnnnnnnnnnnnnnnnnnnnnnnnnnnnnnnnnnnnnnnnnnnnnnnnnnnnnnnnnnnnnnnnnnnnnnnnnnnnnnnnnnnnnnnnnnnnnnnnnnnnnnnnnnnnnnnnnnnnnnnnnnnnnnnnnnnnnnnnnnnnnnnnnnnnnnnnnnnnnnnnnnnnnnngagagagagagagagagagagagagagagcaaaacaacctttatgcaccataattaattggattctagattttctgagcagctacaagagacactagggaatatctgaataaaccataaatactaattggatggtactcatgaatctgagaacatgtgccagatattatttgccttaacctggtacatagagctggatctcctatcagtggcttctcaagagttcttgattccctatatgtctcgagaaccatgctattgtttagatagaaaatgtcctcctcaggccttgtgtatttggagatttcattctgtagcactatttgggagattatataacctttgggacatggatcaaacagaaagccaaaagtttgaaccttgagggttatatactaaccccacttctaacccaagcaacagctgcttccttatccaacaaaccagaagccacacaagaagctcatgctgccactgatggagtccatctgacaagtcttcctccttaacatgctagactgtagctctttaaaactgtgagccaacatcagcctttcctcctttaaactgctttctgtcaggtgtttttcataatgatgaagaaagtaactagtatgcttttacacgtgacttaggacacacacacatacacacacacacacacacacacacacacacacacacacacacacaccaaggaaatacaggagggagggagttatatactcataggaaacacagccacacagacactaagcaatagaaaacacaggatttatgctccaacaggaaaaacaagagttacatgtcaacaggagacatggaaattatgtaccaatagaatgatatcttgatatactggctccttcgaagagatcttctctaaaagatgatcttatagagaatctccctccctcctccctcctctctctctctctctctctctctctctctctctctctctctctctctctctttctctctttttctatcgctatccctctctgaaaagctttgatttagttggggtattgtcataaagctgccaaatgtgtcaagtgtttatctggtgctcagcatcattgtattattccatcttaggtcagatgtcagtcacaacagctgtaatgtcaccacagaaaaatgactactaataagtgtccatgaaataatgaactttgaaaatgcaagactttttaaccaacataagatttgagttaagcaagacttatcaatgaatactgaaatcagtgacaaaaaaaaaaaaacatggctaaggaaaaaaagtttcaaaaattctgatgaattatacaacgagtcctttaaaatttataaaggaaaaattatgcctttgcatatgagacttctgaaagataccagcttaactgggagatcaaacacataacaaataacagagccatctgaggccccgtgtctctgaaaaggattagccatgagatatgcatcatcctctgtcagtctgtcttgtcaaaaatgtttttctagtgtctggttatagtctatgcctgacttccaggagggataaaaagtaggggataaggttaatcaacatacaaaaaaaaaaagcagttaggtgacatgggcagtgtacagggcatggtcagagctcttcaaaagccagaggcataaaagtaacatgaaaaaagtagtctacttttcacccacagctaaacactaaactgaactcctggaacccagttgcagagagggaggagtgatgagcaatggggttaagactggactggtgaaacccacagaaacagctgacttgagcaagggggagctcaggaaccccagactgatggctgagaggtcagaatgggactgatccagatccactgaacgtgggtgtcagtgaggaggccttgacaatctatggggcctcggtttgtagaccagtatttatcctttgaacacaaatggacttttggagcccattccatatggaaggatgctctctcattttggacacatcggggagggcctaggccctacctgggatgatatgacagactttggagatcccccttgaagggcctcatcctccctgggttcaaaggggggatgggtgagggcttgggagggattggtggagggcaagggaggagaggagggagagggaactgggactgacatgtgaaacaagcttgttactaataaaaaatcattaaaaaagaaaaactagtctacttttaaagggagcaaaaaagaaagcaaaagaatatatacatgtacatattatacatacacacacatgtatgtgaatgcacacacacaaacacacacacacacacacagagagagagagagagagagagagagagagagagagagagcaaaacaacctttatgcaccataattaattggattctagattttctgagcagctacaagagacactagggaatatctgaataaaccataaatactaattggatggtactatannnnnnnnnnnnnnnnnnnnnnnnnnnnnnnnnnnnnnnnnnnnnnnnnnnnnnnnnnnnnnnnnnnnnnnnnnnnnnaggagctatggtatgtgcatttcagtttgatgtgcagagtctgaactcttatttcaaggggtcctgtgttttgtaactgtgtgtaactaaaaggaaagaggccataactttgcaaaagtgaataatttatcttcaaatcttgatgttgttagtgaatatttattattctgttgtgtccatattttataggtttgaactttttcttttaaaatattggagaaaactgaagatccaagtgatatttatcataaaaatgtatcaagtagtggtgatcacagcacattgtctaagagcaattccatgaatgtattttgtggaccatcaatcaagagttgtgccaggataaagaaagaattccatggcctgatatgtttgtggagcaagtacaataacttctcctagtggtgatgtacattttcatattgatgatgatagaacgtactgaacaaactcctttttggtattgtgatctaacttcaaaaaacgatgctgaatatgatctggtctgaaagcaaccagccacagctggatagtacagtgcttaggattcataaaacatgatacataaatggacaactctcagctgtgagcagaaatcaaaggaacaaacttggtaagacacatgaagtggtttaggttttctttgcatccctggtatcttaattaaacaatcaacggttaatcctaaagaaaggcacatttgttgacagtcagatttcaagcacagtaaagtcgggaaacttcaatgagaatgtctaatatttcatgttttttactctaccctatggggttttactgactagaatgacagctagcctgtgctacacaccatgacaatatttaaagtggcttgccaaaagttcatcacccaaatgtgccccaagatatacaattgaaatcagattttataagactgtcactgaacaggatgtagtgtgtttgatgccatttcccactttatattttttaataatggggcatataaaaggttatctgcaaacaaaactatgacatgttcattcattattgctttcaacagctcagctcagctagcctaacacttcttgatatgaggcaaatctacctgacttgcttcctcaagcctggacagactgtgggtgcagacatgagaaagggaagagtctcagtaaggatttcacatattcttccattgcttcctgtatttgaaggagtgcctgccacaaactgaggctctaaaaagttcaggccaggacttgctgtgacaatgcttccctcacaaacggtgagggcagaaggtcatctccaggggtcacattcacagatgtaactgcatcactacaagtttgcataacctaatgaggccactttagagaacagtaggaactcaacagacaatttttttcatttttaaatgctaaataagcctctgtgatgtgtcaaatactactccagatctgaggaatacagatgtaaatgaaacaaatatgaaaacttgtgtaacttacatgctttgggaaaaaataccaatacaaaagtcattggtttttagatagcattaagtgcatagggtaaaaactccaaggagctgagccatgtgctggtagggaactacttttgtcaggggaatctttctgtagcatgacatagagagttgaaaagatcagtctcttcaaaggccatcttcctaattgatgagcacagggacacaagagatgggcagcaacaagaaaacatctaacaggccagttaaatggcaccatgggtagaggtgcttgctgtcaagcctgatgacctgggtttgatcctcaggacccacacaatgggagaagggaactgattttcacatgttgttctctgccacagatgtacactcatatacaaacacacacacacacacacacacagagagagagagagagagagannnnnnnnnnnnnnnnnnnnnnnnnnnnnnnnnnnnnnnnnnnnnnnnnnnnnnnnnnnnnnnnnnnnnnnnnnnnnnnnnnnnnnnnnnnnnnnnnnnnnnnnnnnnnnnnnnnnnnnnnnnnnnnnnnnnnnnnnnnnnnnnnnnnnnnnnnnnnnnnnnnnnnnnnnnnnnnnnnnnnnnnnnnnnnnnnnnnnnnnnnnnnnnnnnatttaaggaagaggacaacttacaaaaggttcccaccgcaacacaactttaatcaagaaaatctctataacactgtgtttatgattcagtattttattgccaagttttctgacatgtaagtaaattgtagggcaaacaattttggcttccccattctctcctcaagaaaattattctcttttgggagagtatatacaataaaggcaaatctgacctgattcctgggtccgcgtgaggatacctacagaagacagatccaaaaagcaataataaaggctatctggggctcaccaagtaatttttacctgacgattaacttttctaaaatgtagtaactctgaactttacacaaactcttctagaattattcttgttatgggataaaaatggctgtttttcctcaaagttcttgtgctggaagtgctgtcactgtggccatttggggaatatcttaaaaagtggggccgagagggatatcaccaggccatggggccaagcccttgtgaatgggtcggtgacagctggcaggattgccagtttgatggactaggttattactgtagctgttggtaattaaaagaggatacctggccccttcccagttactagcttcctttctaaccatgtgatctcttttgcacaagttccccatgctgtggtacctgggctggggatatagttcagtggtagagttcttacccaacatgttcaaggccctgagttcaatgtccactgctacaaaatataattctttaaaatatatcaatatttaggatatgcccttttttaaaaaaggctaaaactaaccctgaagtcggctttagtatacaaccttcattctaataacactctttaactaatacatgattgttgatcccctgtaagcccctctcccattgctctctagtctctaggatgttaaaaactgtttgcctggacccttgggcattttttcctaaagtagaccaagtattattctgcactgaaattttatttgcttacctagaacagtaggaccttctgggttctacaacccttgtcctcaacatactgttagtaaactggagagcatcaagatagtccacatatcatccaggcttgctctctgattatggacactgtggatataatgtgaccattgtccctggttctcagggaactccaggccaataacatcacctcctaaaattaatccttccatccattcagtatgggggagggagaataaactcatataataatcagacaagattactttactgagaggtataattcaaaggaaatgtgaaaagaaatgattaactgatattgttctagattgactgtaggagaaggaaaaatctgagttgatgatgttcagctgagtcttggtgcccagcagtcagcccatccacctgacattatctatgattatttaaaagagcacaaatggagggatagaaatgcacacatatctgctactggaaatgacaaaatacatataaataataaatgctggataaatttttcaatatgaatgaagtcacagtaaagtaaaatattgaagaaaatggaagacaaagttcttagtgtctcccttttaaactatggtaacaacaccaacaaggtgtcatcaatatagatattcagaaaagggagaagttgttttaaaaatcattcttaattttaaaactaaaaatagacacagagaacacttctaggatgatgcttgatagatatggaagggagagaaaaaagagtggaagtaacaaattgtctaagaacaaattttataaatgattgaaaaagatactcgaacatttctgttttaacagtaactttatttcctccttgtgttttatgaatctgtgcttaactgtttatgtatttaaatcctaactatcatcctgtgtatactattttaggcaattactgcaaaaataatgaaaaatctttattgaccatgatgggaagagcttgataaaacagaactactatcattatatagtttctgagtttttgtgattaaagccttctacactgaatggagaagagaaaaatggagaggagagatgtgactcaggtcatttggcaagttttattgcccagggcatctctagtagtgagttgtgataaagttagtgtttacaagaaaacttttctgtcctctgccttctaggaacgtggtagttcagacgtcctctattctttacagtcttgtcatctactctggctgttgactctgggggtgggtggcataatcacttctgagaacaacttatttggttgtcagtactacttacttccctctatgggtagttgtatcattcctgtaatggcatccctgacatactggatcttataatatggagagctggctgtaggtttctgatgagtttgtttgtgcaagtggaaaatgaactttcttcttcaagtcattaaaagtgtgtctttatttattgctgtagtattcatagaccattctaaaagagaagttgataacaagaagtggaggattgccacaaaaagcataaaatacacagctttatcttggaggtaggcagcatgttttaagatagagggaaagttagcaccccacataaagaaatgggcaagcacttggtacaactctcacctacagttactggtgtgtgctggagctggcatacatccaagagcactaacagaatctctgctcaactctgagttttattgtgtcagggtggtaacttggatctgccatagaaggataaattaaaccaatgaaattgggaagcactataaatcatgacatttggggttttttcaagagctagctattaaacatcaccacaacactgacaacaataatttaaaggcaggtcccacagtgaagaaatgtgtatttttgggaatggtcaacatctgattggaatattaaccatagtggatgtttattgcagttttcagtgtattaaaaattaaggatagaatgagaataaaacaggtccatatagaagccagaatatcaggcatgagaaagttcatattcagggatgggtagaattagagaaggatatccttctaacctgggaaggataaaaccaagattcattctaagagacaaaggcaaagaaaacctagtttcatgcaagtggtaaatagagggtaggtcctggaagtttttgttacagttttccaaacaacttaagaggaaatacagcaaatccttatgactaaatatttagatttgttcaaaagtattccataagaaaccaagaaaaaaacaaaagcatgtttttcccctcaaagtcaagattgtgtgcccatgcatgcgagaatatatattcatatgtgtctgttgccaaatgaatgtgactctaataaacaagtaaaaaaaaacagtaaagtttaaaaaagaaaacattcctgcacttgaggtgtgtgtcaccaaactcagctgtgctaatacattctttctaccactcagtaggtaggcatggtttctactagtagtgacattctacggtatcactaacattgattgttctttccagtttagagatttagactgccatgagcgtgtacctgtgtttgtgtgtgaattgtgatgtgtgtgcatgcacatgggtcatgtgtgagatgtataccttgcatatgctaaaggacatcaaattcttctattgttctctacatagacagtgtctctcactgaagctgaagcttgccttcctcccacctgcctttaccaggatgtcagtaagaaaacccctcacccactgctatgatgtttctgatttttgtcatcttccaggtccccacagtactgaggttataaacacaggaaaccatacttgtcttttttgtgtcatactggggacctgactccaggtcttcacccatgcacagcaaaaactcttacacactgagcatgtcctcagcccccaggattgcctttatacctgctatgttaggaagctagaagatgaaaattttagatgtattctaataggaattgctgttattaaagtgtggaattcaaaggcaaatgggttgaactagaagaaaccattctgagcaaagtaacccagtcacaaaaaaaagacaaacatggtatgtactcactcatatatggattttagacataagagcaaagaattaccagcctacaatccacaccaccaaagaagctaggaaacaaggagtctaaaagagagatagatggtcccccgaagaaggagaaaaagacaagatctactgagcaaactgggagcatggaggggggtgaggaagctaggaggaagagaaggggagaaaaggaggggtgagaaggacatgaggaagcagtaaagttgagttgggggaagaatagcaagataagagataacataatagagggaaacattatagatttaaagagaaatcaggtaccagggaaatatctggagatctacaaaggtgtcaccaactaacaatctaagcaacagaggagaagctaccttaaatgccctcacctgataatgagattgatgactaacttatatgccttcatccagcagctggtggatgtagaagcagacacccacagctaaacactgaactgaactggaatccagttgcagagaaggaggagtgatgagtaaaggggtccagaccaggctggtgaaacccacaaaacaatgggaagctcttggtcctcagactgataccggagaaatcagcatgggactgttccagaccccatgaacatgggtgtcagtgaggagacctcagaagtctatggggcctcttacagtagataagtacttatccttagcatagcccattccacatagagggatacttgctcagcctagacacagggggtgggcccaggccctatcccaaaggatatgacagactctggagactccctatggaagacctcaccctccttggggagcagaaagggtatggaataggtagggtattatttggagggacagggaaggaggaaaggaggggaggaagagggaactaggattggcatgtaaaataatcttgtttctaattcaaattttaaaaatgagtaaaaaataaagtgtggaattcaagaagaccaacaagatagggaagtttaattaaactaccaataactaataataaaagaagactgcttaggtcactgggaaacttcttaattctcaagaataaaatacttgatatatgatccttgtaacattctgttggggactttgggagcttttcctcccttctgatgggagggtaaggcactttaagttgtttgtaacctagatccccttcatttcaaaggcccagtcttgacatacctatccaaaaatgatatgtgcccagaggatatgaacaagtatactaaccgaagaccagaaaacacacacatccataagctcagaagaggatttccgtttgctttcacttatttcaatcaccttacatttatgaaaactagaattcatgcagagtagctgactgcacctgaagctttttacaattctctccccctcattttacagggaagaaaagtatccatgtcatccatggatatgactaagtatccatggatgacatggctatgagaaagaggaacagtgagctgttctccctgacaagataaaattagatttccaaatgaccctgttagcaaaggaagcaaataagagtaaagaccttaagctgtttcaaagtgcattttgaagtgagaaacggtgtgtgaaagttcaagatcagaaccaaagagacatacaggtatcactgacctccagctactcaggtgtcaacaacagttctgtggctggggagaaagcaaataaagagtgtccccatgatacacgagcaagagacagttgcatgaagaattcatgcagtgtttctggaatgtgtgactgaattaattcaaggaaaatatgtggaatttagagaggccttaacttgggcaactctgttttttgagagcaaacaacaagcattttaaaccagagtactttggccttggttacaacaagttagtattctcagatggcagcttcatgtattcccgggagaggtaagttggcctacactgtgtgaaggtgctataacctacaaatattagctatctggttgctacatttcagaaattctaaccaatagaatgttatgcatagtatcacaaaagaatacagataaatctaacggagttcagtgaatattctagatactaatgtaaaagaagccaattagtctatgaataaatatcactaatgaatgagtgtttactttctcatggtgataatgatggtgatgatagtgatatcatctgtgatggtaatacatgatagtgatgaagtaatggtgactatagtgatgatggtatataatagtgatgatgatatataacagtgatctgatgactatggtgatgatgacatagaatcgtgatgatgtaatgatggtggtgaaataatgttatgctgatatgatgatacaatgctaatgataccattgtgagggagatggtagcaatattggctgtggtggtgtttactatttagtggccataactaaggtccacacatcatgctaaagatcctaaaagcataataatatttatcctgcattttattggggaaattggaagctacagtagttagagtacttgtcatgttgggaagacagataattgaccatgtgaagactgactttaattatgttgaaacccatgttcagacaacacattttcagaaatgctccaaggtcacatgctggcaaagaccaggttccaaacacaagtctgcctggctctggaacttgagcacacactcacctcacacagttctcctactgacattccaaccatttgccaggttttctcaagcttctgctatacagaatttctgtaggaatatggcagccttctaataaatattccttgactaaaataactactttttacaatagcaagcttcattatgaacaaattataatgtgaaagctacaggaatgaagtaccatggaaagcaaatattttttaattttatttttatttaaattatttaattaatattcatatttacatatcttccccccattccctcgccctcccatccttccaggttccccaccaatcccccaaatccattccccaactcctccatagggatagtgaggccctccaccagggaccttcaaagtctgtcatatcatttggggaagagcctaggtcctccttgctatatctgggctgcaatagtatccctccataggaaatgggctcccaaagtccatttgtgctctagggttaaagactagttccactgttagaggtcttatagactgtcaggagccagctctggtcagatataaaaagtccttctcagcaatgtagcaaaccaacagatacaaaaatttggaataactccctgtatcatataagaccaccatgctttaaagttagaattcaacaacaacacaaattgcagaaaccctacaaattcatggaaattgaacaacacacaattgcaccattctgggtcaaggaagaaataaaaaaagaaattaaagacttcctagaatttaataaagaatgaagacacaacatacccaaacttatgggacactttgaaaacagtgctaagaggaacgttcatagcactaagtgcccacatgaagaaactagagaatagtcacactagagaattaacagtgtaactgaaagctctagaacaaaaggaagtgaactctccatggaggagtagacaccaggaaataatcaaactgagagctaaaattaataaagtagaaactaggaagacactacaaagactcaatgaaacaaagagttagttcttcagaaagtcaagaagatagacaagcctttatccaaacttaccaaaaggcagagagagagcatgctaattaacaaatcagaaatgaaatggggggggacataacaatgcatactgaggaaatccagagaatcctcaggtcatactttgaaaacctgtacttcacaaaatttaaaaatctaaaggaaatggacaattttctggatcaatatcacttaccaaaattaaatcatgaacagataagcaacttaaacagacctataacccctaatgaaatggaagcagtcatcaaaagtctaccaaccaaaacaaaacaaaaagcccggggccagatggtttcagtgcagaattctaccagaaattcaaagaagagctaataccagtactcctcaaattgttccaaaaaatagcagcagagtggacattgccaagctcttatatgaggctacaattaccttggtacccaagccacacaaagacacaatgaaaaagagaattacagacaaatatacctcatgaacatcaatgcaaaaatattcaacaaaatactggcaaatcaggaacaagacaaggctgtccactctctctatatctcttcaatatcgtccttaaagttctagctagagcaataagacaacaaaaggagatcaggggatacaaattggaaaggaagaagtcaaactttcactatttaaagatgatatgatagtgacccgaaaaactctaccacttaattactatcactgataaacaccttcaccaaagtagcaggaaacaagattaaccaaaaaagtcagtagcactactatataaagatgataaatgcgctgagaaaaaaagtcagagaaatatcactctttacaatagtaactaacaacataaaatatcttgaggtaacactaaccaaaaatgagaaagacctttaaagaaagaaattaaagaatataccagaaaatggaaagatcttccatgctcttggataggtaggatcaacatagtaaaaatggcatccttgccaaaagcaatctacagattcccatcaaaatcctagaacaattcttcacacaccttgaaagaacagtactcaacttcatatggaaaaacaaaaaacccagaatagccaaaacaatcctgtacagtaaaggaatttccagaggcatcaccatccctgatttcaagttctattatagagccatagtcctgaaaacaccttggtattggcacaaaaatagacaggttgaccaatggaatcgaactgaaaatcctgatattaacccacacacctatgaacactgatttttgacaaagaaggtaacgttatacaatggaaaaaagaaaatatcttcaacaaatgttgttggaataactggattcagacatatagaagattgcagatagatcatatctatcaccctgcacaaagcttaaatcccaatgaatcaaagacctcaacataaattcagccacactgaacctactagaaaagaaggtaggtggtatcctctaacaaactggtacaggagactgctttctgaacataacagcagtaccacaaacattgagatcaacaatcaacaaatgggacctcctgaaactgagaagcttctgtaaggcaaaggacacagtcagcaagacaaaacgccagcccagagaatgcgaaaagatattcaccaaccccacatctgacagagggctgatcaccaaaatatacaatgaactcaagaagctagccaccaaaacaccaaacaatgcaattaaaaagtggagtgaggaactaaatagaaaattctcaacagaggaatctaaagtggctgaaggacacttaagaaagtgctcaccatccttagtcatcagggaaatgcagctcaaaaccactctgagataccatcttactcctatcagaatggctaaaatcaataacaccaatgtcaatctatactggagaggatgtggagaaagaggaacactcctccattgctggtgggagtgcaaacttgtacaaccactttggaaatcagtatggtggtttctcagaaaaatgggaatcagtctacctcaaaatccagcaattcctctcttgggcctatacccaaaggacgcattttcatacaataaggacatatgttcaactacattcttagaagcattatttgtaatagccagaaactggatgcaacctagatgcccctcaactgaagaatggatagagaaaatgtggtacatttacacaaaggagtactactcagcagaaaaaaacaatggaatcttgaaattcacaggcaaatggatggaactagaagaaaccatcctgagtgaggtaacccagtcacaaaaagaaaagaaaatctaatagaattgtcacctttcccacattatcccttagaaaaggcaatgtaacaaattcatttgcagttatctatgtaggattgaattaatttgccctaaatgtggtcactgagtcactgccaaatcattaccatttagtttttgttatgcatggtccaaagccctatcctgcaaaagtggatggaagccattgacagccaaatcagaaaccttcaccagaaaactgccatcaacagtgagcatgattcactgttcacctgggttctaaccaaggcctacaaaacaaggaacttaagtgcttctcagcatctaggcctgacttgaagaatctccacaatctaatcatatttaaacaccaggaaaacatgcctttcaggaagaaagacactgcagagctctcaaggagtcccgaaggaagattaagtgggctgtgatatccacaaatataattaacaacctaatagtgtatgcattcagtactgattgctgcataatcacttgactaatagaaagaaactaatttgccattatagctgttgtgagattacatttaaaggcaaaatcacagcacagtgggactgcaaccctagatgttagcttaaaaagaaccaatctttccctctcatttctccattaatagttgctaagaacagtaactaaacatggcattagcattgaagtcttacagaagcacagaccacatgaatatattggcctgttatcactatcctgcttcaataagagggactagaggcagttaggaggtaatgtaatcaatctttacaaggacataaattctgaaaatcctgatcaaaagtggtctaaagaattaggaatgcttacaaaatccttttacttatggcaagaacagcagacctgttcagagctgtgtgtgtgtgtgtgtgtgtgtgtgtgtgtgtgtgtgtgtgtgtgtgtgtgtttgcatacccatttttacatatgtggacatgtatgtgaatgttcatatgtgtgcaagtacatgtgtgtgagtgtaaagatgtatgccggtacctacatgtgcctgcagaagccaacatcttacccaacctcaagtgtgaacctctcaagtgtcatctgcgcttatccaagacagagactctcaatggcctgaaagtcaccaaagaggctaaactggctatccacatgaatatgtggctctgcctccccagaaacaggcttatcagcatatatagtcatgccccactctttatgtaggcgctagagtttggactcaggtcctcatgcttgagggcaagcactttacccacctacccatatcccagcccagtgtcttcatgtttttttttttttaagtaaaacatcaagtcacatctttgccatattaagggttatgacaagtaggatgaatctagtagtataccctcataatttcatggagattcacatagatttacatggtaagtaattaggcttatctgtatgtatatggtttatatatacatgtataaataaaggtaactcaaactgagcactacggacattttaagttaaataattgcagcttgtaaggagactgtcctatacattataggacccctaattatactaactactagaagtctgtagtacacatgttgctgccccataatgtatgacaactagtggtaaactagtctacagttaaaattaaatgatttaaagtagcattagcagtacatagagctaggagggacataccacagccatgtagcattgggagacaaatttctaaatgattttaaatatctgcatagtagccactaataggtttaaattccacataaggaaatatccttattgctactattagaaccttgaattaggacagcttatttatagtctgaagttaacaagtaaaagtgaagaaaaaaacatccaaaagcacactatccagcagataagggacagcccaagacatagggaacagaagtctgagtttacctagtaagataaaatagaaaacaagctgagctgactcagccaaatctgtcccctgacctcagtactcaagtattaattgatggctgacatcaatactttctattttttaaccctacacaaaaaatattccagtaccaccatttcattcctaaaataataaataaataaataaataaataaataaataaatctattcccttagatacaaatcccaaatccatatggctgaatcttgctttttaacccagtttatggtgaatttttatgacttttaactacttctcatctaaattcctgtttttatcttttaaaaagaaatttgataatgacatgagaatctagccatatcattaataatgatcacatgtagttgttttaaaatcatcaaataatatctataatgtatcctggtaataaatgtcaaaatacactttggtgtgaaaggatcaagttccactctgtgttgagcttttgaaaaagttcctaaagtgttatcaagccatagagttatgttaacactacaatccagtgtcttacaatcaaccaacaaagatatgtgcctgggcagttcagcaagtgctgtcacacactttacattgtgctcctgcagggtgaatggaaccagcactctgcctgtatttctccctagtcacaacagcacaaagccaactctctttaaagtagttctcaactgggaaagcccatgctttttcatacacatttcactctcatatgtgctcagtactccacttttgaagccaatgtgaataatcctgcctctcaatattggaatctaaagaaacaaattctgttacaggggcaataatgtgaaggattgtgtctttctaggaggattactgagaatatgattgctgaaggaaggagataggggtggagagacaactcagttgataaggttctaatgagcaaggatgaggacctaagctccatccccagagtcacgacacagtcctgtcgtcagagcactgggaaatggacacaggcagctccctggctccctggggtttcacaggcagctattccagttgaatcagtaagttctaagccaaggagaaatcttgtctcagaaaaacaatgtaggcagcatcctgaagagtaacagctaaggatgacttatgattttcacacacacacacacacacacacacacacacacacacacaagggggaggaacagcaagctcttgatgagagtcaagtcaaaggagaagttaggcctagacaggacaggcggatacacactcactgcaactcacagcttaaaatttcatgtaaagaagagtactttctctgcactaagtacatttaacactaccattgtagaccaaagactgcaagcaaaactactcccaaggtcactggagttagcaatcactctagctaaacagtcataatgtttaacatttgtcttgacagccatctactgccatttctgcctctgtaatttttctactatcttttatcttcttcaagagtagcttttacgaagggcccattatgtacaaggtgctcgtgtagagacacaaaaatgcataagtcttgagcattgaccttgaaacatccacagcccctaaacagataacagcagtttgaagtgagaagtatctaacagaatggaactaaagtgtaaagaaaggagctaagctccaccaggggaatccatcagatatcatagaagagagaggagcatggaagcatcagtaagcacttacacatcccagagtgtagaggcaatccagacagagcctcatggtgaggggtgtgtctggagcattgatcatggtctattccagagctggcacaggaaaatggtaccctgtgaggcaagaagtgtagcatgggaaaattgctggagccttaaacacctccaagttcccattcatattgcctgtcatcttgtggagccagtggtgacatatagctgtgaccatttagctgttctttttagttacctcagccaagacttcatcacatctaaagtggccaggtccagagaaaccctgttcttttgactcagagtttcagggcattatcctatgctattagaaaagtgagtggatttttacaatctttcttcttttgagactatgtcttctaaactacaggatggcctcaaattcactatcagctgaggataaccatgaacttctgattcttctgcctctacctcccttgttgtggggatcaaattcagggtttcatgcatattagaccaccattaggccaatggaactgtacctcccagccactggtatagttttcattttaaaataggatttatatttatcccaaggggtaaattgtggtgggaactgttatgtggaaatgaatctgccattcttaggttactcttagctgttagtccccattccctctacttgtccttatttttgaactggaataactgagatctatctgtgcattcacatgccactagaggccacatcagtgttcacaggagttcaaagcacttctatcttcctctattatgaattcacatgacttgttcatctgttgaatacattccttatcctgcgatccaaacaaaaacaaactcagcttgagactttgtatggttactgaggcattgcacattatctctacatgtttccccatgtaagaaagcaattacaggagctggtaagtctcagctgccaagcctgaggatctaagttcaattccaaggacctgcatggtggaaggaggaaatgaactaccaaaagttgtattctgacttccatgtgcacgccatggccttcaaacattcacacatagacatacccacacaacccaaacaaaatataataattttttctaaataaaagaagcaatcataatgaaagccattttggtgtttttgtagaataatcttgaatccattttaatttgtaaaggaaaagaacagtggcaaattttcctgttgtaccaatatcacttcatatataggatgctggtcctgcagtgtgagacccaccagctcaggtttcaactgagaaatattaacagacatttccaaataatacactcaatgttggtagtgcacacatagtccttagagtatatagaagcccctcctaggcattgggaatactccgagataactagcagaatactggaagcacaggctgagccacatcctatacctggcagaacaaactcggtcacctttccactttaagcactaaccacgcattctatggggccaccttttccaggttgcagcattgcagggaaacacatatgtacctcggaagattcatttctagtgcagatcttcacagcctcagggtatggtactttgttgttaggttgataacctccacctttttacttaaaagaagaacacgatgccaggcttgctgttctcatgctttggaaccattgttaagaaacacaaggtttatttaacagaaacacaacagtacagtgacagtcaatctaataaccaaagtgcccgctgaatgaccagcataaaggtagcatccatacagcatatactttggacagaacaaaaagtacttgccatgtaagcataaggacataagaccttcaactttgcatgtaatatgctaagatggaacttccagtatgtatttgaaatcttagttcatgtggtatataaaatgtgttaccaggcaatacacagttactacagcctcctaagaaccagagagggcaacagaaaccaagtaaggcaacaaagacaggatgccaacccagactactatacctactctaaggctatatttgtagatagatgttgtttaaattgacttttgttttcattttttttaattatggaatgctttgttttctccatctgttgtgattgaaagtgttgctgctaaagtagtatgggctggcatttatagtctcatggagtcctttttataaacttgggtgtccttgtgtttgggacatagatgtttagaattgcaatgtcctcctggtggatttttcctttgatgagtatgtagtgttcttctctatatcttccaatttgtttttgtttgaaatccattttgtcagatattaaaatggtacaccagattgctccttagatccaagcaaatggagcatgctctagaaggaaaattccaatgctatcactgcttaaatcacatgttgagtttcacatgctgatagtggagatgtcaataccccattttcaccagtacacaggtcatccagacaaaaactaaacagtgaagtgatatagttaactgaagttataaatcaaacagacctaacagatatttacatttcacctaaacaaaaaaggatatataactttttctcagcacttcatggaattttctctaaaattgaccacatactaagacacaaagcaagtgtctctgtctctgtctctgtctctccctctctctctctctctttctctctctctctttcaagacagagtttctctgtggctttggagcatgtcctgttcctcgatctatacaccaagctggctcaaactcacatagatacacctgtttctgcctcccaagtgccaggattaaaggcatgcactaccactgccacaccagcaagtctcaacaaatacaagaaaattgaaataacacctaaactctatctaactaccatgtattaaagccagatatcaacaacaacagaaggcttacaaattcatagaaatggaacaactcaccaatgaatgaaaaaatgggtcaagaaagaaattaaagattttcaagaactgaatgaaaatgaatatgcaatataccaaagtttatgggacacaatgaaggcagttccatgacacaattccatagcattaagtgcctacataaaaaatggagatatctcatacaagtaatgtcatatcacacttaaaagctctagaacaaaaagaagaaatcacacccaaaaggagtagacagcaagaaattatcatactaggtactgaaatcagtataataaaaataaacaacataagaaaaaataaagaatcaatgaaacaaaacaggtggttctttgagaaaataagtaagattgacaaactcttagacaaactagctaaagggtgaaggaagaatgtccaaactgacaatatgagagaatgaagagagggacatagcaatggacaccaaggaaattcagagaatcatagggcataatttaaaaacctatactccttcccccatcaacaactgaggcaggtggagagatggccctgaggttagaagatcaggggagctgtctctgtccttgtccagcaaaaacactctttagagcaggccctgcacctcatgtgtgtagcacaatagagccaactgcattggtggaggtgtgtgtaagccagctccaaagttgtgagaatgggagagttgtccctcttacccacctgacatgtggcagcatgggcaagggagagatgccctcctgccaaaatgcctgaagcaggtaggagaattgaccctgagggttagaagagtgagagagctacccctgtctgccaccagctgcagcactccggagagcaagccctgcacctcgtctgagcagcacaatagagccaaccctgttggcaaaggtgtgggtgagtaggccccaattttgtgatcataaaaagctgtcctcattacttacttctcatgaggaggaatgggtgggagggagatgtccccctcaaacacccatcaattcgtgggagagctggccctgagatcataagagcaagagagctaattctctgcccctcattgctgtagcactggggaaagtggctcctactacacaaccggccaatctaatagagctaaccctgaaggtgtagatgtaggagatttgattcctgaggacataaaagcaagagaacctgccctgcctcttgatcattgcttcaaagggtgaactagccaaggcaatgcagtggccagtggtggtgaggacaagagagagctggcaggcctggccaaccctgcaaccacccaggtctagaacctaggttatgtgttggcccaccccaatatcgaccgtatctgtcatctgctggagcacatggaggtaccagtcatgcagacccaaagctgcagcatctccacaacacatggcaacagcaggataaccaaggggagttccagtgagggcccagcatctatagtatagcagaaaccagagacctcgaaccagaccaatgattcttcacagtcagcactttcaaataggtaaacaggcaaaagggtcaagtgcgtgactctctgtatcataccatggcttctatgatgagatttctttccctttattttttcctttttctcttaagttttatctggtggtgtggcagctacaagggcagaaggtagataagaagggatgggaaatgaatgggatcaagatgtaggatttgaaagacacatagaataaataaaaagaaattttaaaaaatacctatactttaccgaataggaaagtctaaaagaaatggacagttttctcaatgaatacaatttaccaaagttaaatctagatcagataaacaacttaaacagacctataacccctagtgaaatagaagcaataatttaaaatccaccaaaaaaagtcaatgtccagatggcttttgcatagaagtctaccaaactttcaaagaagaattattaccagtactcctcaaattattccacaaaatacaagcagaatgttgcttaatttgttttatgaggccacagtcaccctgatacacaatccttataaagacacaacaaagaaagagaattacagaccaatttcctttatgaatatagatgtaaaaatgctcaataaagtacttcaaactgaatccaagaacatatcaaaaagatcatccaccatgatcaagcaggcttcatgaagagatggctcaacatttaaaaaaaaagtcaatgtaacccaccatataaacaaaacctcacatgattgtctcattagatgcagaaaaggtctttgacaaaatctaacaccccttcatgataaaagtcctggagagaatagggatacaagggacatgcttcaacataataaagatgatttacagtaagcatataggcaacatcaaattagatggggagaaacacaaagcaataccaccaatatcaggaacaaaacaagactgtccactctctccatacctattcaatatagtacttgaagttctagctagagcagaaaggcaactgaaagagataaagtcaatgcaaggtggaaaagaagaagtcaaagtataattatttgtaggtgatatcatagtatataaataagagtccctaaaaattctaggaaatacaggaaactactatagctaataaacacttttagcaaaatagctgaatacaaagtcacttcaagaaaattaatagccttcctatatacaaattacaaattatctgaaaaagaaatttaaaaaaatacccttcataaaagcctcaaataatacaatgtgtcttggggtaattctaaacaagcaattgaaagacttgtatcataaaactttaagacattgaagaagatatcagaaagtggaaagctcgcccaggctcatagatcagtagcatgaatatagaaaatgcccatcctaccaaaatcaatctacagattcaatgaaatcccaatcaaaattccaacacaattcttcacggatcttgaaaggaaaaacaaaaagcataacaggttagctaatattaagcacaaaaaacaagaatatgatcaatggaatcaaattgcagacccagacataattccacacacctgatttttttttataaaaattcaagaaacatacactggataaaggaaagcagcttcaacaaatggtgctggtcaaactgtacgtctaaatgtagaaaaatccaaatattcaaatacaaatggatcaaaaacctcaatataaagccaggaacacagaacctgatagtagagaaagttagaaatagccttgaactcattggaaatggaaaagactttctgaacagaacaccattagtataggcactaagatcaacaattaaaaaatgggatttcttgaaactgaaaatgcttctgtacagcaaaggatacatcattcagacaaagtagcaagttatacacttggagcaattgctcatccagttgaaggctaatatccaaatactcaagaactcaaaaagctaaatatcaagaaaacaacctaattaaaaatatccccccagaatagtacagatttgaagagaggtctggcacagggaaaatgttaggggattcacatgggtgaccccaactaagaatccaagcagtggtggagaggctgcctctgatgccattcccctataatgagattgatgactaccttggttaccattcctagagatttcattcaatagctgatcgaagcagaaataggcacccacagctaagcactgaaccatactcctggaatccagttgtagacagggaggagggatgagcaaaggcgccaagatggggctggagaaaccggcagaaacagtggacctggcctagtgagagcatgaagaccctagtcataaagctgcagaaacagcattggaccaaaccaaggcctatgaatgtgggtgccagctaggaggccaagacagtctatgggacctctaacagtggagccagtctttatccctagagtataatgaactttgggagcccattccctatagagggatactattgcagcccagatacagacaggaaggagggcctaggccctcctggaaatgatatgatggactttgattgtcccccatggagggcctcactgtccctggggaggagttgggggtgggttggtgggttggtggggaacatgggagaatgggagggtaagggaatgggggatgaacatgtaaatatgagtagtaattaaagaataaaaaatatacccccaaaatggtatatagctctaaacagaggattcttaaaagaggaaactcatatggctatgaaacaaaggaatgttcaacattctgagtcatcaaggacatgcaaatcaaaactactgtgagatttcctcttacatctattagaatatttaaaatcaatgaaacaaatgacagctcatgctggcaaggatgtggagtaagggaaacactcagtcattgatggtgagatccagctatacgactcttgagcagatacccttaagaatgtttcatctgtcatactatagggccacttgctcatacatgttcattgccgcactattcataacagtcagaaactgcaaacaactgaaatgttcctctgcagataaatggataaagaaatatggtacatttacacaatagaatattactctgccatttaaaaaatgataaaatcatgaagttcacaggcaaatagatagaactaaaaaaaatcatgctaactgtgatatcccagacccggaaagactaatatggtatgtattctatgtggatatcagttgttaagccaatgctacaatctataaaaccacagaggttaggtatagagtaagggacttgggaggacagacagatctcccaaggaaagggagatagaatagttatagattgatggggagtgggagaatcaagtgtgaaggggaagagaaggggaaatgaggaagagaaaacaggcagagacagctaaaattaaggactacatttgaggtgtagtgttgaaacctaatacagtagaagctttcaaaaaatacacagatagatgaaggagatctaaatgaaatgtgaataacaggggagagagagtcccaattggacatctcttgttaccagatgaagcttcccgtaccagtattgcaggccaaagggatcccatgggaaatcctaaggaacccagactcttgccaatactttgggggtttctccacaaactcacagaaagaccctgttgctgaagacagcacctacacaactcattgaacactggaacactccagctgaggcctactagagctttcatccctgtgctagcatctttagtaaaggaaggtactctgcatgttaccaaaggataagcataaacatcaatccaaccacaaacccttttatctacagtggtgtcctgtctgcaagataggctagtgcaatggtgacatgaagcttatggggataaccaaccaatatctgacatgctttaaggcacacatcagaagaaggaacccatagctgacattgcttgggtgaccaaaatcctgaaacttgatagcccatggacctggggtaaaactactagtttaaaaaaaaagcagcaataaaatggctcataatgacattctgctagacctttgctcagctatcatcagagaaacttcctcctacagaagatggggacaaatacagagacccaatgccagatattatgaagagaaagacaggccttggaatattcagtccccaacaaatgccttttctgaagacttagggaaccctgcaaaagaggaagcaaaaagagtataacagccaaaggagctggaggacaccaaggaatcaaggccttcttggcacaacaaggctggtgcctacatgaactcagagactgaggtagcatgcacagggcctgcacagatctgcaccaaatggggtccaagagctgaaaaaccagaaacatgccttcctccctaacccagaagctatctccaagtgacaagcacttgcaaatgaaatttcagttttctccaagggagcctactcctaaaggtaggctgcatggccaacagaaaacgaattcaagggcatcattggcggttccttttctcataacataataacagggatttttttctactattttttaaatgtatcacacttttatttttaattattattttttctttctttttacccttaggttgttttatggtttagtgtttttgtgggattgctgaatgtgtgaacaagtgtgtctcttcatctgtatcagtttcatgtgccttcccttaggcactttttcttctgtttgtttggttgtggttttttccctattcctaaacattattttgttttatcatattatattatattcccttagaagcctgattgttttctaatgaggggtatatacagaaagggggtatatccagatgtgatgagacgggaagaattgggaggtgatgggggagccacttttaataaaagggggaaaacacttccaacacaggaaattttaaattgaaagaaaatgctaccaaaaaggcactaattttaaaatttatgaatatttatttctgaaatgttatattttctatttctgcaattcagttaagtccaagcaactgaaaccataaacataaacatatggatgaagagagattaatgtatactaatttcatatgcagtatacttaaaaatgattcatcacagagatgcgacaaactaccaagctggataaccactgcctggatattcaactgagaatataaactcgtgtttttcagggtgctctgttgataatacatctacagttctcactagaagtgtattgtgaaccaacaacaccagtaacctcttactattttatagaattttgttttgagttcagatttttctgttggaagttttaacatgagcaaatatttatttaaatcaaataacaagcatttatttagcatacaaactaaaattttgaatacaccctgaaagttccagatgcaaagacaaaggtcttttgggtcctcacaattacttggcaagtaccttcctggtgaagccatcccctggaccctgtagacatgctctttttccctgtgcttaattaatggcaccaagagctggagatagctagagctagacagatagacaatgattaaaaccagaactgtgctttctgagaactcatgttctgtgccaaccattcacgtctagcatctccgggggatacaacaccctcttatggcctcctcggacactgcactcactgaagcacacaacacacacacacacacacacacacacacacacacacacacacacacacacacacactttaaaatgaaaataaaatattttcaacaaaaaggcagtgggagcttaaccagctattatatacttgtgtctttaggacatgtagtcatgcctgtaatttcaccaagactgtgctatttggtgaacggggctgaaactatttctcctttgtatcatttattgaagattaaaagtggtcttacttttgaaatatgaaatcccagaactaggggattactattttatattacatttcacaagcattcatttcccatatttataaatgtaaaagaacttatcatatgtagggaatgggggggagccacattggtagcagaagttcttctgtgaagcatttgcctcccgagttataggccctagagaacagttaacttatgttgatcacatctttttcagtttccttcatgttttccttccacctacagtttatcccaccttctcctatcaatttctatattagcttgttacataaaaagcagcccccaaaactctagtgctttataatgacaaacacattccttgcccaagaagcatgctggtaattgctaggtagctatgaagttaatcactgtatgtagcatgtgcactggtgtggaaggagagatgagaaggagacattacattgtgcgtaaaaccttctgaggaaagtgcattgttacttcttcatacagctcactgagtatattcaacatgatggagctgacattgtatagaagacttttcctgggaagatgcagcacacacacacacacacacacacacacacacacacacacacacacacacacacacacacacacaccttctcaccctagtgagtgaattcatgaacgaccaaattaatgactgtaccaaagtccaacttggtgaactatattagggttactaacagaagtaagggcgaggaagggtcactgagaggagcagggatgacttgaaaatcatagagcttattaatttcttactttgccgtgtgaaaatgaacaagtgtggcccagcaagtcccaagtccattttatgttagctattcaggcaaattgctgagttcttccagcctgcatttgataaagccagggactttgcatcataatgggcaggagcagtcactggaaaaaaatctgtccagaattgtggggtgtttctgattactcctaaacaatcccagacttcagtaaatgcagtgtttccattggaagaggagccctgctgagctgccggcttcagaaaggtaacagagcccagagcgccctatagtggccactaaagcttggtgcttaacaagaactccagaatcccggctttctgcgtttgacttctctatctctgccagaagctgggtttttagaaaaactatccataacatcctaagagacctgttccccgtgtcacaaacgtgtttacttgaaaagtaccaagcaattcgattctcttcacgtaaaaataatagatgttagtctgttgctctcttaccctagaactatcataaacagatattcgatttggtttttaggaaggaatgaagctttgtcttggggcaagagcttgaataatttgcaatttagattttgtttttattaatcacaggtcagtgcactatcacaaagaaatatctaagtagtttctaattcttgatatttccaaaatgattacacagtttattaatgaaggtcacagacaccccagtttactggtgtcagtgaaaacctgatgccatgtgttaattaagaatcaccatggcgatgaaaatgggtgtcactatgccagtgcgctgctatggatgtgtgagttcgcagcgccctctactggatagcacatggctggtgcaggctttttttcttttcttttctctcttctcctttcctttcttttcttttcagctaaaatcccattaggagcactgggaacttcatcccttacagtgatcgcaggatgaggccttatattaaagctttggaaggaacaagttattaaggctttattgtataggtatggattgttttcaaacaccacgcttttctttctccctgaaatttcatttcaaatatgattgcttctgtgagaaattagcaattgttagaaaatgagtcgagagacttagcttacaatctgactctccttttgagcacttagatgcattttttcacgttacagaattagaatctaattcatataggacatctttaaaaatgtctttatactcccaaaagaaatgccttcgatgcgtgttaaaaacaccaaagcttacaatcacatgatctcggcttaggatagagtgaagcaatatagtcttggagagaaacaagtttctctccctctttctccctcctcctctctttttccccttcctgctccctccctctctattctcctttcccttctctctccctccttctccttcactttccctccctgctgttctgtcccctcccagctatccctcctgagtccccttcctggactgagggtctggatggtaggagttgttcctcctcctggccaacttggatcttaccttaagtatcctgggccacatgcccctggaccccttctgtgatgtctctgagctatgaaaagcctcaaatctcagagtgctataaaaggagtggggtttgttgttgttgttttgttttgtttttttaagtgaagaaagatgtaatgtaacctatatccccacactcagaatgaagcatttctatccacaaattagtcttaactaaacatgaaaacatgtaccagtttcctgtttctgtgaaagaaatcacctgcaaatcaggcgggtcttaggataagtttaccctgtaaaagcttgcttattgcacttagtggagctagtttagggctttataaacatggggaactgcattcagatccctgcaccccatataaaaactgaatacgcctttaatcctagcacttggcagacagaggtagccatcctgatctacagagcaagttccaagacagccagagctacacagagaaaccctgtctcaaaaataaataaataaataaatcaataaatcaataaataaataaataaaagctggatgtggtatgtgttggcttgtatctgtaaccccagccttaagtgggacagtaacagatagacagatccttgaagttcattgtagccactctaaacaagtgagctccaagttcagtaatagattctgtctcaaaccacaagatggagcacagtagactaacaagggaacaaggtggagcacagtagaggaagccctccactttgatctctgtcctcagaatgcaagcgcacgcgcacacactcacacaagcacacgcgcacacactcacacaggcgcgcgcacacatcagccatcctcctttgtctatacagaacacagaacatgggcagaggtgccttcaacaggaaaaacaatctccttcccagaaaagcagtgatgatagcccaaggcatttcaaagaaagtgttagaatttatttacactataaatgtctaaatagaacatttaacttgaccaaaaatgaattgtccttcgcattttcctccattcagtatatttataagacttgcatttgtgatcaacacgaaacagtagaaacagccaaagaaaccaggagctttgaacacaagaagtacagaacagcagaggccagatttgtgacatttcgatacagcccctgggaaaatgcatggctctgtgaataatggcaacatggttgcctgtttctcccggtggcaaagatgaaattattaagtgctgcacttattaaaaaagaaattggaaaaatattctctaagcctggaacataagatggtgtcaagatactgtggaagacacactgcttgcattgactggacaataatcaattatgtaaatacctgttaatcattctgaatattcattggcaactaactataaatcacatgaagtcatgaatttgatttccaatttattttgttaggctggaaagatgcctccgtcgttaagagtacttggtttggtttggttcccagcccccacatagtggctcacaacaacttgtaactcccattctgggatttccaacaccatcttctaaactccatgggcgtcaggcatacatgtagcacacaaacgtactggtaggcaaatactagtacacataaataaacccaaaacctttgtttagaataaaaagattaattaattttattatttactgcacttgtgcacgggtgcccacagaggccagaaagggcatcatgaccagctggagctgtacttacagacagctgtgagctgcctgacttgagtactagaaacctaacccaggacctttcctagcccagagagtacccagaactgctgcaccatctctctatctcaagcctaggaattttctaatacatatttgtaacaattcatttgtttacagaacatttgtttatagtttctaaattattttaggacaaattgtttatataggaagaggtctagaaaagtgggctcagaagcgcgcgcgcgcgcacacacacacacacacacacacacacacacacacacacacacacacacacaaactcagggtagccagaactaacctcttggctgtctccatgttcaaagtaaattcttagtacccaaagggaaaggacaaccatgtgttggtggcactggtaataattgctgcccacagggatggagctagatctgtgtgttcttccattagccacataatttaccatctatgtctagcagttaatttcctttgtgggtggagagatggcttagctgttaagggtgtttactcttcttttcagggaacctacatcaggtggctcacaactttctatgacttcagctccacacaatgctgcaccctcttctgactgtcacaggcaactgtacccgtgtgcatgtataatttttaaatcttcttaaaaatttaatttctctgcaaatcaaaacaactctgagataccatctgactcctgtcagaatggctaaaatcaaaaacaccaatgacagtttatgctggagaggatggacccctgagcaaattgagagcattgaaagaggaagtagggaggaagaggaaggatgcagaagtcatgagggagcagaaaggttgaatcaggtgaagaatagaagaaagggtataggttgggttttagttggggaggtggtcggggaggacaggagggagaagggaactgggattgtcatgtaaaacaatcttgtttctaattcaaattaaaaaatgataaaaaaaagaaagaaggcgcaataaaaaatttaattactcagttgtttgcaggtttttgctattacaaataaagctgttattaacttaattgagcaactgtccttgtggtatgattgagcatcctttgggtatatgcccaacagtggtatagctgagtcttgtggtaagttgattcccagtgacttccaaagtggctgcacaagtttacactcccaccagcaatggaggagtgtttcccttgttccacatcctctccatcatgagctgtcctgtggagagccacagccctaagatggcgcctggctggatgccaggtagtccaagcttagctgtaaacaagccttatttggaagtgcttgaggcatctggcatgcttcctccttctgtggcctatccgggattgccagatggcatgagctgattgggcactgagcatctacttaagggcttgtgggtgctgggagaagagagaagctcttgtacaaggttcctgaataaactgcttgaagaagaatcgtggttgtgtttctcttgttggtcgagatagacgtaacactgtcccttgtatttttatcttagccattctgacaggcctaaagtggaatctcagggtcctttggatttgaatttccctgatggataatgatattgaacttctccttaagtgtttttcagtcatttgggattcttctattgagatctgtaccccatttttaatgtttttatttgaattagaaacaagattgttttacatgtcaatccctctccctccgctccttctctgtcccccacaactatcaccctacctatcccataccctttctgctctccagggagggtgaggccttccatgggaggatcttcagagtctgtcataaactttgggatagggcctaggcccatacccatgtgtttaggctgagggagtatccctctatgtgcaatgggctcccaaagcccatttctatgctagggataagtactgatctactacaagaggccccatagatttccgaggtctcctcactgacacccacgttcatggggtctgaatcagtcccatgctggttcccccgacatcagtctgaggaccaagagctccccgttgttcaggtcagctgtttctgtgggcttcaccagcctgctctgggcccctttgcccatcactcattcttttctgcaactggattccagttcagtttagtgtttagctgtagatgcttctacatccaccagctgctggatgaaggctctaggatggcatataagtcagtcatcaatctcattatcaggggagggcatttaaggtagcctctcctctgttgcttagattgttagttggtgtcatctttgtagatctccagatatttccctagtgcctgatttctctttgaacctataatgcctccctctattatggtatctcttatcttgctctcctctattcttcccccaattcaaccttcctgctccctcatgtcttcctcagccctcttcttatccccttctcctgtaccccatttttttattagattatttggcttgttgatatctagttccttgagttcttcatatagtttttaaatcagccctctgtaagatgtggggttggtgaagatcttttcccattctgtagtcttccatttggtactatcaatggttccctttgctttacagaaactcttaacttcatgaggtcccatttattagttgttgatcttagtgccttgctattagtattctatttgggaagttgtctcctataccaatgcatttgacattatttctcactttttattctatcaggttcagtgtaactggattaattttaaggtctttggtccacttgaacttgagttttgcacagggtgataaatataaattgatgccaacatccagttagaccagcaccaatcattgaaaatgctttctttttttccattgtataattttggcttctttgtcaaaaatcaggtatccatgggtgtgtgtatcaattctattgatccacatatctattttttgctaataccatgtggttttcattactataactattgcaatagagcttaaaattaggaatggtcatacctctggatcttcttttactgtacaggttgttttggctatcctgggtttttgtttggtttttttttttcagatgaagctgagtattattctttcaaagtctgcaaaaaattatgttgtgattttgatggggattgcattgaatctgcacattgcttttggtaagatggacatttttactatgttaatcctactgatccatgatcatgggagacatctccatcttctaatatcctcttctatttctttcttcaaagactagaaggcctttcacgtgcttggttgcagttacaccaagacattttatattgaggctattatggagaaaaatgtggtacatttacacaacagagtattacttagctgttaaaaaacaaagacaccaggaaatttgaaggcaaatgtatagaactagaaaaagaaaccatcctgagggaggtaacacagaccaataaagacaaacttggtctgtactcactcataaatgggtattagctgtaaagtaaagaataatgatggtataatccacagacccagagagactaggtaacaaggagagttcaggtggcaggcacccagatctccctgggaagcagaaatagaggagatttcatgagtaccctgatggcatgtggggatggaatatgagtgatcagattccagggagcacagagagggagagtgctgagggagactctgggggatgcatttcagggttgggcagaagcctggcacaggggaatctccagagagtctatagacaggaccacagcttagactcctagcaacaatggataagtagcttgaactagccatctcctgcaagcagatttgtgcctggcccaattatcatcagagaggtgtcaaccagcaactaatagaggcagatgcagagactcacagctgatcctgaggtggagttcaggaatcctgcagagaaggagaaagaagtgtaggagccagaggggtcaagaacaccgcaggaaggctcacacgtcaactaacctggcctcataggggttcacagagactaaaccaacaaccagggagcctgcatgagactgacctaggcactctgcatatatgttacagttgtatagcttggtcctcttatgggattcctaacaatgggaaaagggactgtctccaactctttactggtttttggaaccctacttcttgtaatcggtctccttgcccagccttaatacatgggatggcacttagtcttactacaaattaataggtcatgtttcattgatactcattggagacctagatggagatgaaagtggagaggattggagagttggagggaggggataggggagaggaactgggagggaaggatgggaggaatatatccctgtgccgggatataagataaataggtggataaaaaattgaatttattttcccactatacttttattaacatatggtgttaatggagtactgtatgatgtttagatacattgtaatgttaagtcaagtaaacttttgtctctatggtgaggaatcttggctgtcaatttgattgacttgaaactcacttaaggggattagtgaggccagctgtgggtataaatgtgaagccatttctgcagatgattcactaacatagaagacaagccctgaacatgaacatcaccatcacttaggctggggaccagaggggaaggaggagggaaatgaagaggcctgctgactcaagcactctatctttctgaggtgagctgctctattgaaccatgctgtccctgccaagacagaatgagaactgtgaaggcatgagatgagggaattccctcaacttactttgatcacatttttgccatagaacaaaaaactaacataatagagcaaatcagtatcagagaagtagaatcattgtcatgactacccaatcatgaagttcagctgcctaggaaatggtgtgtaatgggaagagatttggaaaagtttcaagaaccaagatagaaaaggcctaaatactatgaccaaagcttaaatgagttctagacgttggctcagaagactagaatgccaatagaaatgtggacagtaagtaatattttcatgatgtttcaaatgggaataaggactctattgggaactggacaggagacttttgaggttttatcgatgacctgagactgctgattctctccatttaaaataataggaggtttatgaagtaagacaactgtctattaaatttattgccccaaagatagcatcatgaaattatgctaataataaagactaataataataataataaagatgtaataatgactcataatgcatatgtatgtacattagtgtatgtgtacatgaatacagatatgtgtagaggccagatgagagtgccagatgccctggagctggtcatgggctgcccatcattgttgctgagaactaactctaaccctctctaagggcaacaatggttcctaacctccaagctatctctttagcctactggttgagtgtttctaaggtgaatcttacaagggggaatctttttgaaattgggtagttgttttgctatattttaatagctttgggttggtataaacagtgaggcagggggtccaaaggaagtcttcatgaataaattggtagtcctgatggcaatggtgaagctgttttcacttgatcccagaagtttaaattaaggataaggactaatactgtcccttctgttgtacagacagagccaagtaattctgttgatttcagcagccacaccattgactttggccttaggcctatggaaccaataaagccctggtcagcaatcacaaaggagggggaactgtacaagttactacagcatctattctgttgttcctattaatagcttaatagctaccacaaataactagaaattgaatttatagcatttaagaggaaggggaaacagctataattgtagtaaaaatccaatgttgcaataaactgaacacaatattatgatggagatgaaatgagaaaaggttaattggattaccatgattcctcactgtaatttctgcagcatgtaaaaaatcacagcattcttctctctgtgaacatatgtctcttcatctaacttccctaaaatacctctcacctggacccactgtcctggataagtctcagatatcattcggtagtcaaatatcatacatttaagaaaataaacatgatatcccataaccacattgagttgtgccaccccattgtcctacagtaatctgtgaactcctggccctcttagcagacttcacttagtgtcacaattcccatgtactttcctttcttgtggctaatctgtatattgtcaggagccaagatctctgccttgttcgtcctgggcttaccctagtgcattaccatgtgatcagtatttagtattatcaagatgtctactgaatattatcagggagatcaaacttcccacaagaaggatattaactagaatgaatgtatttaagtgaattttcacgcagcaatgttattttatgcattttgctctttgaaattttttaagaattgtttctgcctgaaaaagactctaaggaactttctgaattgtcataaacaaaatggaacaaggactgactcttgggaaagctgctagcactttgtgcgcatcgttgtttagcctgtaggtctctttgtcaactccaaaagtcaattctaattagggcagatccaagcatttagctacccaagcaatagaagtgacaatatacaatttggaggataaatccctcaagctacataaaatattatcgatgctaaacaatcaatgcactgatagaaaaaaaaaaacaaaacaggaaaaccatatactaagaatcatcacatggacttgaaggacatttaattggtaggacttcctgaagagtagtataaatctcacagtgacatttaggaaggttttaatctactaggtattccattaaacaactaatctctacatctaccaatatatacaaaatcttttataactgatagcatgaactagcattatgaaatgactactttaatatgcagtggtgttggattttatttttgaacactcttcacagttttctgagcatgggcatttcacagctaaaaatgtagagaaaccctgatgctccctggcttctctcaggtttggacacctgtaccactgctctgtgggctccattgtgtctatttcctcaacaagaagggtacaagtgaaacatagcagttatgtgtgacttccttaaatctggagttggggtaagtctgggtgcagaggacttggctgactgctcactagctgtgtgttcacctgcttctcctcagatcccagcagaagtccatatttcttccagaacaagagcccttcattaggaagattttttttgtttttgtttttcgagacagggtttctctgtgtagctttggagcctatcctggcactctctctggagatcagggtggcctcgaactcaaagagatctgcctgcctctgcctcctaagtgctgggattaaaggcatgcgccaccaatgcccagcaaggaagaattcttaaacacttagtgaaaatgaagatctagccaaccatcaccaaaattagtatggaatttcttcaaagttataaaaccgcatcaccagacaacctagctgtattgtggggtacccaaaactcagaaaactaaatatcacttattctgtctatattgtttattttctattaatgtaacaaaaaaatcatgaccaaaagcaatgtatggaggagaggctttgttttagtttatggctccagagggatagagttcttattgtacaacatggtggcaagagcaggaagcttgctggtcacatttttactgtacaaggaagcaaaggggaagaagcaggaagtggagcaatgctgcaaatcctctaagtgctctccagtgatgcgctttctctaacaagtctctacctcacacatgttccatgacctccccaaacaaccccaccaactggggaacaaatgtcaaaatacataagcccatggacaatattttagattcaagctaccacactctcatatgcagcattaagatttttaaccaaagacaagtaagttaaggggatatttttaggaagaaggagaccattgaaatattcagagtacaagaaaggacaatagatgtaatcaaagttcattatatgttatcaaaatggcacaatgaaatccattattgaatctaatgaatgtatgctaatatattgaagcaagagatggaagaatctcaggcattaaagatccaatagaagaaatagatacatcactcaaagaaaatgttaaatccaaaaaaaaactctgatacaaaacatccaggaaatctgggagacaatgaaaagatcaaacctaagaataataggaatagaaaacagaaaagaatctcagattaaaggtccagaaaatattttaacaaaattatagaaagtctcctcctcacataataatcaaaacactaaacacataggacaaagaaagaatattaaaagctgcaaataaaaaaggacaagtaacatataaattcagaccaatcagaattgcacctgaattctcactggagactctaaaagccaaaagagcctggatatatgccctacagactctaagagatcatggatgccaggcaagattactataccctgttaccataggtgaggaaaataagatattccatgataaagtcaaatttaaacaatatctatccacaaatccagcccaacagaaagtactagaaggaaaattccaaaccaaggaagttaacaacacccatgaaaatataggcaacaaaaactcacaccaacaaaaccctaagaagggacacacacacacacacacacacacacacacacacacacacacacacaccactctaacattaacaatcattgctcatagatatccctttatatcaataaaaagacatagagtaagagaatggttgcataaacaggatccatccttctgctgcatacaagaagcacacctcaacatcaaagacagacttacctcagaatgaaggttcagaaaaaggttttctaacaaatggacctaagaaacaatctagtatagtcattctaatatctaacaaactgacttcaaaacaaagataagcaaaagagacatagtaggacacttcatactcatcaaaggaaaatcaaccaagaagatttttttattcttaatatctatccccccaaattaagggcacaaatttatcaaagaaaaactactaaagtttaaatcatacatcaaccttcacacattgatagtgggagacttcagtaccctactctcaccaatagacatgtcatccatataaaactaaacagagaagtactggggctaacaaatattatgagccaaatggacctaaaagatatttagaaaacatttctcccaaacacaaaagaatacactttcttctcaacacctctaggaacatcttccaaattgaccacacactaggtcacaaagcaagtctcaacagatacgaaagaaaaatgaaaaaaccttatatcctatcagaccaccatgaattaaagctgaatcgaaacaacagaaacaacagaaagcctacaaacttgtggaaactgaacatctctccactgtgtcaaggaagaaataaataaattaaagacctcctagaatgcaacaaaaatgaatgtactcccccatacccaaatttatgggacacaatgaaagaggtgtactaagaggaacgttgatggcactaagtgctttcattttttaaaaaaatggaaaaatctcatactagcaacttaaaagcacacctgaaagttctaaaacaaacagaagcaaacacacccaagaggagtagacagcaggaaaatcaaacatggggctaaaaaatcaatgaaatagaaacaaagagaacaatacaaggaatccatgaaacaaagagttggttctttgagaaaatcaacaagataaacaaccccttacccaaactaactaaaagacacagagagcattccaaattaacaaacttgtaaatgaagaaaatccaaaaaaaaaaaaaaaaaaaccaatagggtcacacttcaaaaacctgtactccacaaaattggaaaatctaaaagaaatagacaaatttcttgatagatatcatttgccaagttaaatgaagaccagatgaataatttaaatagacctataacccctaaggaaatacagcagttattaaaagtctaccaaccaaaaataagccacaggccatataattttagcacagaattctaccagaatttcaaataataaatattcctaatactcctcaaattattccacaaaatagaagcagatggagtattgccaaatttgtttatgtgtccctgataccaaaaccacacaaagagtcaacaaataaagaaaattgcatatcagttttcctcatgaatattgatgcaaaaatactcaatataatactcacaaaccaaatccaagaacacttcaagaatatcatccaccatgataaagtagggttcatccctgagatgcaggggtggttcaacatacaaaaattagtcaatgtaatccaccatataaacaacctgaaagtaaaaacacatgatcatctcattagctgctgaaaaagtctttgaaaaaaaagcaccccttcataataaaagtcttagagagacatatttaaacataataaaggctatttacagcaagtttatgcccaatatcaaattaaatggagagagacccaaagcaattccactaaaatcaggaacaagacaaggctctcccctctctccatatctattcaacatattaagttctagctagagcaataagaaactaaaggagatcaaggggatacaaattagaaagaaaaaagtcaaagtattaatatttgcagatgatatgatagtatacatgagcactccaaaaagttctaccatggaactcatacaactgataaactcctccagcaatctggctgaataaactcaaaaaaacagtagccctcctatgtatgaatgataaacaagcgtctcctttcttgccctcctctattcctcccctgtctcagtcctcttgttttcctccccccactcctcttcccttcccacctccttcctctccacccctccccgtgctcccactttgttcaggggttcttgtctccctctccttcaagggactatgtaatcttctcttggggtcctccttgtttcctagctcctctggcagtgtggattgtagactggcaatcctttgctctatgtctaaaaatcatatatgagtgagtacataccatggttatctttttgtgactgggttacctcactcagcatggtttcttcaagttccatccatttgcctgcgaatttcaagattccattgttttttctgctgagtagtactccaatgtgtaaatgtaccacattttctctatccattcttcagttgagtggcatctaggttgcttgcaggttctggctattacaaataatgctgctatgagcatagttgaacaaatgtctttattgtatgaatgtgcattcattgggtatatgcccaagaaaggaattgctggatcttgaggtaggctgatttccattttcctgagaaaccaccatgctgatttccaaagtggttgtacaagtttgcactcccaccagcaatggagaagtgttcctctttctccacatccactccaacatagactgtcattggtgttattgattttagccattctgataggagtaagatggtatctcagagtggttttgagctgcatttccgtgatggctaaggatggtgagcactttctcaaatgtttttcagccattttagattcctctgttgagaattctcaatttagttctgcattccactttttaattgcattgtttggtgttttggtggctagcttcttgagttcattgtatattttggtgatcagccctcatcagatgtggggttggtgaatatcttttcccattctgggggctagcattttgtcttgctgactgtgtcctttgccttacagaagcttctcagtttcaggatgtcttatttattaattgttgatctcaatgtttgtgctactgctgttatgttcagaaatcagtctcctgtatcaatttgttagaggatatcacctaccttctcttctaggaggttcagtgtggctgaatttatgttgaggtctttgattcattgggatttaagttttgtgcagggtgatagatatgatctatctgcagtcttctacatgtccaaatctagttatgccaacaacatttgttgaagatgctttctttttccattatataactttagcttctttgtcaaaaatcaggtgttcataggtgtgtgggttaaatatcagggttttcagttggattccattggtcaacctgtctatttttgtgccaataccaagctgttttcaggagaatggctctataatagagcttgaaatcagggatggtgatgcctccggaaattcctttattgtacagggttgctttggctatcctgcgttttttgtttttccatatgaagttgagtactgttctttcaaggtctgtgaagaattgtgttgggattttgatgggaattgcattgaatctgtagattgcttttggcaaggatgccatttttcctatgttgatcctacctatccaagatcatgggagatctttccattttctgatatattccttaattagatgtcttgatagatgcagacagtacaggtatggagagaagtctggcacagaggaaatgttagaggattaatagggatgaccaaaactaagaatccaagcagtggtggagaaaataccattgatgcccttcccttcccctatatgagattggtgtctaccttggttactatttctagagccttcatccagtagctgtttgaagcagaaacaggcacccacagctaagcactgaaccatactactggaattcaattgtggagagggaggagggatgaggaaaggaaccaagacagtgctgaagagacctgcagaaacagtggacctgacctactgatagaatggagaccctagtcataaagctgcagaaacagcattggactgaaccaagccctctgaatgtgggtgcaagctaggagtctagggaagtctatggctcctctgacagcagagccagtctttatcctcagagcacaaatggactttgggagcccattccttatggatggatactattgcagcccaaatacagcaaggagggtctagaccctctcccaaacaatatgacagactttgtagatccttggtagagggcctcactgtccctggagaggagtcgtgggggaggggaacatgggaggagaggagtatgagggaatggggaatggatatgtaaatatgagtacttaaaaataataaaaaagaaataaaatttgtaataaaaacggatattagctgtaaagtaaaggataatcgtgctacagtccacagagccagagaaactaagtaacaaggagggactgaaatgggatgcatggatctccctaggaaggagaaattgattagacaaagcagtggaggggtgaagtgggagaaattgggactggggagaatcaagtgcggagaatatgaagggagagagcactgggaaagtcgactggaattggggggcatttggaagcaaggttgaaacctaatgcaatggaagcccccaggaatctaagactcctaacaatggggaatatgtagcctggatgggccatctcctataaccaggcaaaacttgcagtgtagatatttgggaaccaagccactcacaaagccttcaacctacaatctgtccaacctgcaagatatgctagggtaaagacaaagcaaaaattgtgggaatggccaaccaatgactggtccagcttgaaacccataccaggagagaaagttcacccctgctactgcctggagggccaggacccaaaggccagatagcgcagagacctaacatgactgggggacagggcaatgaaatgattccaaatgatcttctgctatactcatagactgatgcctagcccaggcaccatcaaagagcctccagccagcaactgaaggaaacagatgcagagacccacaggtggacctcagggaatcctgcagaaaaatgggaagggaggatttttaggagctatgggggtcaagaacaccacaagaagacccacagaatcaactaacctggactcataggggcccacagagactgaaccatcaactaggaagcctgaatagaactgacctaggccctctgcatatatgtaacagttgtgtagcttgtccttgtgggactctgactcttttctttctatggcttttgggacactattcgagatactggttgcctatttcagtcttaatatgaggaaaggtatagccttactgcaactttacaagccatgtttggttgatatctgtgagaggactgccctcttctggagcgaaacagaggattggataggtaagcagagaggaggtgggtgaacaaagactgcaaggagaagagagaggagaaatgttggttgggctctaaaaataaaaataataacaataataataacaataataataataataataataacaataataataataataataataaagataataataataataataataaagtatattgaaaatgagcccttactggaatccccaagagggctgtgtctccagtattttggaacttgcttcatgttaactcagactctgactgcaactgaaggtttacctaaaactccactctgtgaaacaccactggatggtgtctcaatcagtttaggccatcttaaccaagtaacgcagactgtatggcttagaaaacaaactagtatttgtcatgattatggtagaagagaagtttaaggtcaaggcactggatgacacaaattctcgtaagggatctcctcctgttttagggacagctgcatccttgttctgccctcatgttggcagaacaagagcagaagttggactctaatcccatagaccaggagaaatgatctccattagtctcagtcccctccctttcagccctatctccaaacacagccacaatattaattgagacttattgtatatggatttgggggtgcatggcaggtcacaattcgggaccatagcacatacaagattaaactaagccaaattatccatgcacattcaagaacaatgacagcagtaatatctactgcttgttaaacactgtcaccaaattattgctactgtttgggatcattgtagaaagtaatgttcttctctacatatcagtgaatattaaaggcttaaggtggaaataaagccccaccccaagccacacaaacacaaagtgacagactaagaacctaaactcatgtctgtacaaattcaaaatgcaacagaagtccctatgcctctccttttttccttctcagatacacctgagggtcttgtttgtttggtgtgtgtgtgtgtgtgtgtgtgtgtgtgtgtgtgtgtgtgtgttgggtattacttaaatgtttaagtgtggagtgtgtatgtgtgtctctgtgtgtgttgggtatgtagtttattgtttaagtgtggagtgtgagtctctgttctgtgtgtgtgtgtgtgtgtgtgtgtgtgtgtgtctgtgttgtgtatgtacttttgcatataagtgtggtgcgtgagtgtggtttatgtgtgtatgggcaggtgcatgcctatgcacacctttgtgtgtataaagaagccaaaggaggactccagtgtcctgctctattccactctcccttgtgagagacaggatctcttgctgagcctggagctgagctgtttacattcctacagggaactgaaatgggtgtgcagtatatgctcgtatcttaaacactgagccatctcctctgccccatatctgagttttgatgattacagaactattggtatgtcagatatttaataatgtgtgctgagggagcacacattattgcctatatatcttcatacgcctgaaaacacagatgtggaaccagctggttctaacaatgctttgatgtgctataagcacattttacagtgctgtacctcatccattcatcctcttgttctctgaaattccacgtttctctttgtgagcaccagctgttaagctaagctgaccttttttttttttttcttcctctgtttacccttcacatctggcttaattcaaatgtttagagatattgtccagcccctctgtgaagtagcaggtgctctcctgggcgcttcagacacttcagaaaagaaacagcaagttgtcctgtacttttggatcttataagaaaaacaaaatagctaacagatgaaaaaagtgaaatgcatactgcatagaccttataataagcactatggaaaataaagactagaaagagataaaggcatttaggcatgcgggggacattcagtgtgagcctctttgaaaagataactacgctgagttacaaagatgtaacagacatctgaagtgaaaacaagtttcacacacttgagcaacatcagggactcttgtggtacatgtatgagcaagctgcagatgtgtcagagaattattggggacttatcggtcatcataaggaatttcatttctaatactgaatcaaatggtaactcattgcaggaaccagagcagaaagatgacaaagaccagattgggggggtggggcgtaaagggtcatcccagctgctatagagagtggaggggacacaggacagaaatcaagaggccagtgagaaggctaatacaatacccacctaaaagaagtttgacagattggaccgaagtgggaggttctcgtgatggggaaacagattagatttgtgtctgcttagaatatccaagaaccttgtctactgggccagctctgcctcagtttttagccccttgaaagaaatgtctcagtaggcttagccctggactcatcatttctggcactggagtcctcacactcaaccacacattatttcaacttgcttattgaggcaacttcataggcttacgatctggtgactctggggcaaatagttaaagctcaaaaacgcagggtgggccagactaagtacgtcccagctcaccactgaggcagagcacataatgggatattggcagataatgagcttaactcgaaaacgaatgactctctgggccgagtgattctgcaaggggatgatccctgtggaggaatatgacagttttacaaagttccccacgtttcccaacagttagcgcacctgatttaacacttccttaatgaatagaaacagcattatgaacaggggcactgggatccgagaagcaagatgctcctgtcatgcagcgtcagggcaggtttctgtgtcattctttcatgagagagtggattggagttagaaatgacaaaaacagattaagtagctggctgaacatgaagcttgtttctgtggctcagcctgggaggggaaaagggagttgatctggagtacagcttgtctacggggtttctgcctctggggaagaaggcctggcgatgaaagactgggagtgacagaggcactatcttatttatggaactccccgccagggaacgaaagctgtatgcattgtttaaaataagcagcaggtaaggccctccctgtctgtatgatctcacagatgagtgaacaggctgcagccataggttccccagctttcctaagagaagtgctcaagtatgtgctgctgctgctgctgctgctgctcaccaagtgctaacagggatctggcatgttagtgatcctagcaggaggcagggcaggcatgacagccacacaatgttgagatttgacagcctgacagaccaggaaagcatcaaaattcagatatgagtggtctatctcttaaaatagtctcaaaacttccagcttatctttcttttcaggggagaagttatttttgtttttgttttttgtttttgttttctgaggcagggttcctccgtgtaacagccttgactgtcctggaactcactctgtagatcaggctggccttgaactcacagagatccacctgcctctgcctcccaaatgctgggattacaggtgtgtgccaccaccactcaacttttaagtgaatttttttaaaacatggtttgtggtgctttttactgccattcgaggcagagttctgagacatcctcaacatccattcagtcaaaccctaattaactgctgctgtgagggcttatgtagacagattagagccttgagccaagggatgttgagacataggaaattcctcactaggcatgatctacccaacccattgagtcttggttcctcctggttagaagggactcgctcagaaaagagttcctgttgttcactttataggtagtcagtctgcaactaggagccaacaacatcccaagctgagagaagaaatcaatggggacctcaggtcttcagccacagcagactgaattcttgcagaaatcacaatgagcttggaagttagggttcccaagagtctcaagaaagcaatcccgcattgctagcaccctgactgcactttgtgagacccataatggagaacagagagttacatgactggacttcagattcagaaaactgtgccttttaaaactactaaatttatggcaattatagaaatcaagtgcacattttaaaataaatcaataggagtggattacagtattcaattattatctcatgacaaatattctctgaagggatcctgtctttacctgaatgcctcccttaatattttttcttctagtgaaacttaatttggggatttcttaaagcatgtttttccctcgcttgtgttgcttacaataatcacgaggtcatttctattgtgaagttaagatacgtagcaaagaaaataatgccaaagacaaatttcataaatgccatgatttattatgtaaccatttgtgaatacactgtttgcctcctggtagtttatctctaactgatccattccatttaaactacctcttcagtttctttcctccctaatgtaggtagttcatagctaaactttttttaaaaaataatatttatggcattatatttctgcacacaatccatttatatagttatcagaaacaaaatgatgtaaaaaggctttcaagaactcaaatgaaaaatgctatttaaaaataaatattttggctcatgaaagtaaaagaaaccaatgcccaattaaggaattttgtccagactatgatctcctcggagttttatgtaaccagttcaattctgaagttgttggctgccaaataactaagcaatgtagagagtgttgaaaacactcatacatccaacttttttaattaaagttgctgctgacagtgattttgattttaaaatggcaaagggaacgagccctatcctttggtgtttaataaaagaagtgtatggatttgctaagtgaaatctacatctcatgccctatctataactttcaggtaagggtgaagataaaagaattaagcaaaggcctggagctggaagaagctaacttctgttgctaggaaacagatactttagagtccacactctagggttactactcaatgcagtgcctgatgctggttacatgctaatgaggctcttcaagttttaacctaacaaatggaaaggtagtaaagacatctaattgctagagagagcccccaacctggccaggcaggcaggtcctgtgatggtcagcctgtaagcaaactcagactcctattaatttaaggcaggcaacatccatctaaagcttgtgtgggcataggtgggattcttggcagcaaatggcagaaccttgcttaagtgataagaatattttgaagttacttgactagaaattactgaagtaacctaggcatatcccagatctaatgaagtacacaaatgtgattatctgtctctgttgtgggaacaggagtctccagagccccatgcctcacaacctaccacactacagctgtagttaggatgtattttcttttccaactcctcagaaaatgagtttgaaggagtataggggctagagtcatgtgcccattcccttgctgagagacgagaaggtagatggagatacattagacatggagtgtgcgttgtggaacaccccatagaatatgtccttaaggaaacttgaattctgtgctcagaagatgaggtgaagctagcacagcgggacatgtttgtaatctcagcctcaggaggctgagtcaggacaattacacatttgaagacagtctcaaaagcaaaagatgctgccgtagaacaagggaagatgaagataaagatatgaggagaaaggtgaggagaagggcaagatgctaggagacaaaacaaatagaggtctttgtacttgaagacagtccttgtctatgatactttcaagaatagtcattgaggatcatagattaggaagacatttctgaaataaagaaaatataaatataaaacacatacagagctggggagatggctcagtcagtaaaacacttgtcatacaagcatgaggacctgaaattcaaaaccctacatgtactttttaaaagccagatgtaccagtgagtttcttgaatactagcactggggagttggagtcaggagaatccctggagctttatggccagccagtctagtcatatgcacatgtgcacaaacacataaacatgccaaaatacttaaaattgattttgcaagtaaaatgaatgcctacacacagacatgtagataaatctactgaaagccttgaggttaaaaaaataaagggctccattttcaatgctatagtacagagcactctcaagtctctcctatggtctgtaattgaagaccctcttttcatgatagttgacgagtcagtgagaagcctgactcctactatcatcactatctatgctcagtcacttctatctatactgcttggacagtgcctggtagattggtaaaccatgctactaccccaaactaccttacttactgataatcccaccttctggaatatctgtcgtggctgttctctgcactttttgcacttacttggtctttctcagcaagtacttgaatgtgattgatagtatcctttgcacagcatatagaaaatcattgtaaagatatcatagaccttaggtgatgctagattcccttgtggtaaactggttcttgtttttgtcatgttcctgcaagaccaagcaattcaaggtcatcttaacccaatttattgcttggcattctcatgaccattggcatgactccaacatcatttatatataaaaagaggctgacacagccctggctttcctagttcttaggctatagcctcttaaaagttgcatccctaactgtagaagctttcattagagtctccaaatttggcatatcttcaactctaattttagtaccatttggtcagaaaaaaatcaaaagaacttagtctttcaattatttttttgaactgacaaatgtctacaggtcaaattacttttggaaaatttttgatttttgttaaaattcaattgtgctgttctcattaagaaactagttgtattaaagtgaaagtggggactagagagatgcctcagtgaataaagacacctgccatgatgtctaaggacctgagttcaaaccctgaggtggcatggtggaagaacaaaactgacatccacaagtacaaccctcccacacacacatgcatacatgcatgcacatgaaataagtaaaaagtaataaatttttaagaaaaaaagcaaaatagtacttaaaatagatacatatgatcagctatatctagtgaacttaagtctattcactaagtaacttttttttttcgtttttcaagacagagtttctctgtattgctttggaggttgtcctggaactcattctgtagaccaggctggcctcgacctcacagagatcccactgcctctgcctccccagtgctggggtttcaggtgtgcaccaccaacgcccggctcactaagtgactttagagacaaaaactgaaagagaggtaactcgtttctttcactcattcagtctcaggcaaaacaaagatcttgcaagaagtgggtttaaccccacagtctggtgcagatctcaggtttctaagtctgactaagaccaagaagttcagtagtaaaagaaaaatgttgaactgtttggtaaaaggaaattctagttcagccagttctcaaatccaggttctcaagcctatttgtataatcactacacttaaaaaaaagttacgccgggcgttggtggcacacgcctttaatcccagcactcaggaggcagaggcaggcagatctctctgagtttgatgccagcctggactccagagcgagtgccaggataggctccaaagcaaagctatacagagaaaccctgtctcgaaaaaccaagaaagaaagaaagaaagaaaggaaggaaggaaggaaggaaggaaggaaggaaggaaggaaggaaggaaggaaggaaggaagaaaggaagaaagaaagaaagaaaaagaaagtggggaggactagaaaaatgcctcagtggttaagacacttgttcctgcagaggacctaggttcgattctcagcgctgacatggcagctcacaattgtccataacttcagctgcagaggatctgacgtctcttctgatctccaggcacatgttcattgtgcagaaaatccatgcaatcaacccaactcatacacagaaataaaataaatctttatggaaattaagtaacacccaattgcacaattcatgggtccaagaagaaataaaaaaagaaataaaagatttcctagaattcaatgagaatgcaaacacaacatatccaaatctatgggatactttgaaagcagtgctaagaggaaaattcatagcactaaatgcccatgtgaagaaacaggagaataatcacactagagaattaacagcacaactgagaagcttgtttctgtggctcagcctgggaggggaaaagggagttgatctggagtacagcttgtctacggggtttctgcctctggggaagaaggcctggcgatgaaagactgggagtgacagaggcactatcttatttatggaactccccgctaacaagatagacaaacctttatccaaacataccaaataacgaagagtgaacaccaattaataaaatcaggaataaaaagggggacataacaacagaaacagaggaaatccagagaatcatcaggtcatactttgaaaacctatattcctcaaaatttgaaaatttaaaggaaatggacaattttctggacattcttcacttaccaaaattaaatcaagaacagataagcaacttaaatagatctataacctctaatgaaattgaagcagtcattagaagtctcccaaccaaaaaaaaggccagggccagatggcttcagtgcagaattctatcagaaattcaaagtacagctgataccaattctcctctaagtattccatacaatagaagcaggagggtcattaccaaactctttttatgaggcttcagtaaccttgatacccaagccacacaaagacacaactaagaaagagaactacagaccaatatccctcatgaacattgatgcaaaaattctcaataaaatattggcaaataggccgggcagtggtggcgcacgcctttaatcccagcacttggaaggcagaggcaggtgaatctctgtgagtttgagaccagcctggtctacaagagctagttccaggacagcctccaaagccacaaagaaaccctgtctcgaaaaaccaaaaccaaacaaacaaacaaaaagtaaactgaccaaacaaacaaacaaaaaattggcaaattgaatccaagaacacatcagagaaatcatccatccagatcaagtaggcttcatcccagggatgcaaagatggttcaacatacgaaaatctatcaatgtaagccaccatataaacagacagagggaaaaaaacatacctcttcaatattgtccttgaagttctagctagagcaataagacaacaaaaggagattaagggaatacaaatcggaaaggaagaagtcagactctcactatttgcggatgatatgatagtctacataagttacctgaaaaactcaacaaaggaactcctgcagctgataaacaccttcaacaaagtggaaggataaaagattaactcaaaaaaatctatagccctactatatacggatgacacattggtggagaaagaaatcagagaaacatcaccctttacaattgccacaaacaacataaaataccttggggtaacactaaccaaaaaagtgaaagacnnnnnnnnnnnnnnnnnnnnnnnnnnnnnnnnnnnnnnnnnnnnnnnnnnnnnnnnnnnnnnnnnnnnnnnnnnnnnnnnnnnnnnnnnnnnnnnnnnnnnnnnnnnnnnnnnnnnnnnnnnnnnnnnnnngaaaagatattcatcaaccccatatctgacagagggctgatctccaaaatatacaaagaactcgagaagctagtcccccaaacaccaaacaactcaattaaaaaatggggtacagaactaaatagacaatctcatagaggaatcaaaaatggctgaaagacacatgagaaagtgttcatcatccttagccataagggaaatgcaaatcaaaacaactctgagataccatctgactcctgtcagaatggctaaaataaaaaataccaatgacagtttatgctggagagctgtcggagaaagaggaacagtcctccagtgctggtgggagtgccaacttgtacagccactgtggaaatcnnnnnnnnnnnnnnnnnnnnnnnnnnnnnnnnnnnnnnnnnnnnnnnnnnnnnnnnnnnnnnnnnnnnnnnnnnnnnnnnnnnnnnnnnnnnnnnnnncatattcatataacaaggacatatattccaccatgttcatagcagcattatttgtaatagccagaaactggaagcagcctagatgccccttaactgaagaatggatagagaaattgtggtacatttacacaacagatactactcagcagaagaaaacaatggaatcttgaaatttgcaggaaaatgggtggaactcgaagaaaccattctgagcaaggtaacccaattacaaaaagacaaagatgatatgtactcactcatatggacctgctttatgatacatattagtgaccgtgctttatcagagctgttttaatgatgttgctcagaatggtttcctcccagatgatgattgagaagctaatttaaaaaaaaaatggtgccaagaaccacaagagtaacagaactgtgctgttttctgggattttgctttttactttttgttgttgttattgttgttattttgttttttgtttttttttaaatggagtgtgctggatgtctctacaattttgttcaaatgactgtaaaacctggaaaagctgttgctgctattgatgcataatatattgctattattggtctttcatataaatataaatataaacataaaattaaatataaatataaatatacacatataatttgaatttttggaaactttagctgtgctgtcaactttggaaaaaagtatcccagttggccatgttgaattggcatagtacagaaattaagagccatattggtctagaaatgctgaacttaatattttccatttgtacaggggtaacgcactgtattaaatatgtaaggtcttatctacatgggtttgattacaaaaactaataaagtattctctaaataaagataaataaataaataaaacttaaaaaaagttacttaggtcagaacaagatggggaacagctattaaaagtgagaagaaagcagctaatactaagtgatagccatcagttgcatgctacgaagctgtggatgccagggacttcaatacctccttctgaacactttgtaggaattgtttcataacctgtaagtctaagatcacaacccccatacatacagaatggcacagtatcaggttccctctcttagagtctctcctctagacagactgacactcatgccatcttatggtccctgtttgtggtctttcttaagaccagactgcaatctgctttaccatagaccctgcccacagccaggccaacagcagccatgtgatgggtggaacatctagagcacctgatgcccttgcacactgggctagactttaacctagcttttcaggcaatacctcccaatttagctggaattctgtgtgagcagcatggaaatgccctggtgccctacacacacaggcccagttaggtccgatttcctagaagaaacacaagtgaaatcccagctcttcctggtctttctcaaacatcagcacaggttttgattaactccgtttcttctaagggacactgtcactatagcatccaatttacaatccttctgcttcagactctcaggtactagaattatcagtgtgtggaaccacacctagctagctaattctcctcctcacaatgtaggtgagtctctgcctatcacatgtacacgagacttttaattctaaatcattgctgtccaattctctaagagtttattataagcatatttgtatttgctttctttaattggtttggttttcttggtttagggaatttggtttgcttttggtttttggataggtactcatttttaatgtaacatttccccttttattaaaaacagattcttttcttacacaatatatcctgattacagtttcctcttcttctactcatctcactacctcccacctccctcccttctggatacactccctttctatctctcactagaaaagaacaggcttctaagagatgacaacaaaacatgtcaaaataacatgtaataagataaagcaaaacccatcaatgttagacaaggccaaacaacagaaggaaaagagccccaagagaaggcacaggaatcagagacctactcctttccacactcaggagtcccataaaaacactaaaccaaaagaaaagccacaacatacagagaagaccatgtaggccctgtgtttgctgcttcagcctctgagttcatatgaacttttttctcagttaatttagagggtattgttcaccaggggtcctccagcccctccggctcttatgctcttcctgccttctcttcctcggggttctctgagctctgaggaaagggatttgatgggaacatcccatttagagctgtatgctgagaggtgtgtgtgtgtgtgtgtgtgtgtgtgtgtgtgtgtgtgtgtgtgtgttgtggaaatcagtatggtgactcctcaggaaaatgggaatcagtctactacaagatccagcaattccactcttaggcatacaccaaaaagaannnnnnnnnnnnnnnnnnnnnnnnnnnnnnnnnnnnnnnnnnnnnnnnnnnnngagaggtgtgtgtgtgtgtgtgtgtgtgtgtgtgtgtgtgtgtgtgtgtgtgtgtgtgtgtgtatgatgtctggctgtggtctctgtgcttgttcccatcttctgcagaaagatgcttctctgatggtggctgaactcggcactgatctatgagtgtagaagaatgttattagaagtcaatttattgttaccttttgttttgtttctttttataccagtagtatttggttttaccctaggtctctgagctaactagtccctggttcttgctcatgcatgcagtgtcaggtaagggatccacctcatggagtgttccttaagacaaatcagacattgactattccattgttccataagacaaatcagaatcagacctctcatgagctttgtgccaccattgtcctaggttttgtggctggagtagtggttacatttctcttttgatagactgcagcattggataggtactcttcattagaaaaagggagctgtattttcacagttaagagggcaagcactgcctttctttggagaaaatcattaggcctgagtagctgaggcactagaaacgtcactgtgggtgttggagttttccaacagctgtgtccacagtttatgacaagttttccaatgaagcagaaacccctgtttttatggtccctgtacctcctgatgttacccaagaacttcagctttgccagttcaaggagacaaagaaagcagaaaaagacactgaatagagagtctcctgacattgattccttccaagggccatggcagctctcactagactggaaacagggcagcagtggggatgtcagagcactattgttctgtggctgcagcatgtgaccttacctggctggaattattttctgctcttggctgtgggatttctggccagtcttatctttctgccttttcttttcaatacttaagtttcatgcaagtgtatgctgcatattgaccacatcccctccagaccattacccttgcttcatccaagcctcctcattgtctcttgatggtttttactgcataagcatacactaagtatatgtgtatgttaaataatgcattatttcaaagtcacccaagcactgctttagtttgagtacagttttctgcatacaccttccactagatttcagccatttggtgcctagggactggacgattgttcctacctactcatctgtgaaacataggaaccttagtgacaaagcccaggctgattacaaagcaaaacttcatacaataaaggatcaaatcagtggtttaaaatcccatgaaatatggagcaagggacacatttccattcttaggaattgattttagagctctaatctccagtctagacaatcagatagagcccagagtaacagcattggcagttagcagtggtttgatggtacctctcgtctctacttttaattgtatggacaagcacaagcaagtgacaatggggggtctcatttacaacatgaaccttggacttcatacatttaaaaaaggacaggtgcaaatgtcattcacctctgagttcttcactggagccttatgccagggcccaaaagccaactgcgaatcacatgggctcctttctactgtaactcccatgcaagaactttagcattaattttaaatgtaataggctgaaaatttgcaaatccaatttgctatgtgactacactctcttgttcccacaatcattacatttttacccagaaggacctagaatttaaatagttaattttgtgagcagtcaatatgctattccaccacaagatggcaatcaaacttcatttaccacacttagaaatggttcctttgctctgccagtgtctcaattgctccatctttcaatctttgtcaacaattaaggcttcaagatcatccatgcttccaaatgaagttcaaaccaaagctgtaaggtaaaattgccacaagaatatccatatttaagcttctgtcattttctgcaggctgtgaactttttgttttgttttcttttgttttagtgagggaagggggtgctctcagtatttaactgcaggtcttccgcctggggattctgagtgccctcaataactgtctcccccacaaagctgtgtctccttcacagatgcaacctcaggaaccaaggagtctgtccatgctttctagtgaagatgttaatatctcttatcttttctgttgcgttcttttttgtcctacttttccacactggaaagccaccatagacccagtatcaccttttgcagaggtgtgcatgacctctaaagactttccactgccttctccaggcaagagcattttggaattcaggacccaggaggatcttacaaacattagcgatgcctgctatggtatgaaaagatcccattacattttttcaatcatttcttccaaggagctatgttgaactccacaggttaagtgtgagccactattgccttatctctgggtagtgcatgttgtttcagttagggtttctggtgctgtgaagagacaccataaccacagcaacttttacaaagaaaacatttcattgagggggcttgcttatggcttcagaggttcagtccattatcgtcatgttagagagcatggaggtgagcaggtagacatggtcctggagctgagagtgctacatctaacaggcaacaggaagtcaactgaaagtcacactgagagaagcttgagcaaaagagacctcaaagccctgccttcctccctcccctcccccccccacacacttcctccaataaggccatgcctcctaatagtgccaccccttcactcccattgggttagggttacatatgtcctatattgtccagtctcatattctccttttctaatttcacagtctacattgtacccctcttcccacttctttacatatttataattaagaccttcacatagaaaagaatatggaatatttctgtttttgagtgtgggtcatcttacttgtctttcctacaaattttatgatttcctatttctttatcactgaataaaatcccatgtatctataaaccataatttcaaataaactgtctctttctgctgcaaaagaaagaaagaaaagaaaaatcatgatagagcaaaggcatgtaatagtctttgatataaaaataaaaagctacacatctcccatttcctccataacacacaatagaagtttaaaaaaaaaacaaaacaaaactagttactgaattgattagaaaagagggaggaattgtctaattgtgtttaggttccttgtgtctggagaagaagatgcactaatttttctgcttctctggctgtttttccttttcttccctttctttatctcttttctttcttttttttttgtaggcggtcgttcatagatatggaattaagaataaaaagctctctttttacccaaatcatgaactagaaattactgtttacaaggaaatacagctgttgttttgtagctgggcactgaggagattaaggcaagaggatcaagccaacctagggttcatgataaaactctatctgaaaaataaggttttgtggggctgtaaagaaggttcaggggttaagagcactggctgcccctacagaggaccaaccagagtttggttgccagcatgcacatggcagttccacgggatctgatgtccaattctggccttgttgggcattgcatgcacttgatgtacagatatacacatgcaaaacatccatcatacacataaaatatcaaaaatggatttttctctgaaaattttgttatagaattatgactacttattgatcatatttcacagtctgagataacacagaataaatcgactgatctcactttcaaattcataggataatgaaatggaactgttttcttttaaaaagtggcaaagagggatgaaaagatgtttgagaggttgagagcactgcctgctcttccagagaatccaggttcaattcccagcacccacatgacagctcatacctgtctgtaactccaagatcttacaccctcacacagacatacattcaggcaaaacaccaatgtactcaaaataaagataagcaaaatattttttaaatagtaacaaagaataggctggtgaaatggcccaagagattaaatacttgccatgcaagccagaccaacggagttacatcaccaggtaggaaagaaatgactccacaacttacttgtcttctgtaacacatacacacacacagagagagagagagagagagagagagagagagagagagagagagagagacatatacaaacatacacacacacacatgcacacacagagacacatatacaaacatacacacacatatgcacacacagacacatacaaaaactacatacacacacaaacacacatacacatgtataaacacatgcaaacacaccacacatacaaataaataaaaaagaaagaatgaaacagaaaatacatatcagcaagctgaattaggaagaaagaacagtttctagacaggggtgataaagaccattattattgcatgtttaaagtcccttgactttaatatcaaattatgagtagctttgaaatattttttctaagtaatttgtattgtttttttaaatcttttttattttttattttacatactagccccagttcccctccctccccttctcccttacccttcacctcccccatgctatccttggcagtccacaaagtctggcataccaagttaagacatgaccaagaccctccaccctgtatcaaggctaagcaaggtatcccaccacagggaatgggctccataaagccacttcatgttcatagtagtcagctgtctctgtggttttccccatcatggtcttgacactgctggcccccttgttcatatgatccatccaccctctcttcaactgaactccaggagctcagcccagtgcttggctgtgaatctctgtatctgattccatcagttactggatgtaggttctatgatgacaattagggcagtcattaatctaattaaaggggaaggccattcagagatcctctccactattgctaaggagccttacctggggtcatccttgtggattcctgagaatttctctagcaccaggtttctccctaaccccataatggctccctctatcaagatacctctttcattggcctccccctccaccccttcaccaactcagtcatcttgatccctcgtgttcccatcccccttttcctcccttctacctcccctcccagtttacccaggagacctcaactgttctcccttcctggggccctccatgtgtgtcccttttagggtccccctttttacctagcttctctggggctgcagatagcagccttgttatcctttgctttatatctaataaccacttatatgtaagtacatatagtatttgtctttctgtgtctggattaccacactcaggatgcgtttttctagttctgtctattttatctgcaaatttcaagatgtcattggtttgtaaagctgagttttactccatttcgaaaatgtaccacattttctttatccattctttggttgattgacatctaggttgtttccaggttctggctattacaagtaatgctgttatgaacattgttgaacaaatggtacactgaacctgatagaagagaaaataggaagtatcattgaactcattggcacaggagaccacttcctaaatataatactagtagtacagactctgagatccacaatcaataaataggacctcctgaaactgagatgtttctgtatggcaaaagatacagtcaataaaacaaaattgcagcctacaaattgggacaagctcttcaccagctccacgtctaacaggaggctgatctccaaaatatataaagaactcaagaaactagacaccaaaatatcaaataatccaatttaaaaatggggtgcagatctaaacagagaattatcaacagaagaaattcaaatggccaaaagacattcgaggaagtgctcaacatccttagtcatcagggaaatgcaactcaaaacgatgctgagataccatcttacacctgtcagaatcactaagatcaaaagaacaagggacagcttatactggagaggatatgaagtaagaacactcctccactgctggtgggagtgcaaactttgtacagccactttggaaatcagcatggtagtttcgcaggaaattgggaatcagtctactgcaaaacccagcaattccactcttgggcatatacccaaaggatgtacaatcataccacaaggacatactggtaattcttaaaagatctatgggattttcagtgagaataattgttctcgatttcagaaaagactaagtactcaacagaatgtttatttccccctactgttgtaagaaactgtcccttcaaagcagtggactacctggagagtcattcccaccatcccagcccatccctagacctggaaagactatcccccttgactattttctgccaatagtatgtacatagacagctgttgagaaaaggaatagagtgaggcctggagacttgcctcgtatatgcaaaatcctagattcaatcctcatttctggggtgggggaaagaagctactggatattcctcatattctcttttactatgtgttcacttcatgcagaagagtctgagatgaattgagatccacttaaaaatcacactttgggcaaatcttacaagagaaaaatgaactaactgtgctaagcttctaacatatttgtttcattactgcttactcaaacaggggaattaacatcttgaagtgcagtggtactgtgagaaaatcctattattagtgagcataaaattagaagaaatggacactccagaaataaccaccagatggtagcaggagggaagtgattttatcacaaatacattttcagaaacttggaaagtagaccatgtgcctagcaaaagtagtcctgagacaggaccattgtgaccctttggggtacatggcagtaccaggagcactgtttgtttggttataactgcagaagagatctggtggttagcagggctcagagatgttggtaggagtccaacagcacacagcatcaccttccacaactagctggactactactgaggttaaaaaggtctatataggggttggagcaatggctcagtgggcaagcatgaggacccaagttcaagtatggtaacctgcacctatagtcccattgctaggagacagaacagaaggatcccagggcctcactggccagctggactacaagaaatggcaagtttcaagtttagggagagacactgtctcaaaatatgtaaggtgatagaagccatcccatttttaacctctggtttccacaatcacaggtacagaagtgtgtaacacacacacacacacacacacacacacacacacacacacacacacacacacacacacacacacggaagttctgctctagagaaagtaactggaaagaggcagaaaagtaatgttggctgttcttcccgtatttggcaaatgtttgaagaaaggaaagagatgaactcagcaaaaagctacaagcagaagtaatagggctgaaaaatgtgtcagatatttgggggcttttacaggtctcataaataacgctctaaaggccagcaggaggaaggaaatctgattcagttaaacaagctaagaccacactacgaatttttttttcattctccaagtatttttttgcctcctggacactaagcaactgtccatggaagtactgcaagactcagatgtcatcaaggacaactccattgttcatttcacccttctagcagaataacctcctgtctcttatatcggaattagtcttccaattgtaccccttcagtatgtaagattttgttctccattgtttcccctttgctgtaaatcttctgaatacagatagtgtcaattacacaccacatatcctacagcataccttacacatagggtacaatagtttctagacaattctatgctcaataacataatattccataaagcactgatccatggtgtttgatctttggatgtccatagtccagtattgagagacaaaagaaaaaaataactccatgaaattcttttttttttttagattttttatttgaaacagaaacaagattgttttacacatcgatcccagttccctctccctcccctcctcccctaccaccttccccccaactaaaaccctacctatcacattttctttctgctctccagggagggtaaaacttccataggggatcatcagagtctgtcatatcctttgggacagggcctaggcccacccctgtgtgtcttggctcagggagtatccctctatgtggaatgggctcccaaagactacacttatgctagggataagtactgatctactacaggaagtcccatagatttccaaggtttcctcactgaaacagaccccatgttcctggggtctgcatcagtcccatgctggtattccagttatcagtctggggagctgatgttcaggtcagctgtttctgtgggtttcaccagcctggtctagacccctgtgttcttcactcgtccttctctgcatctgggttccagttcagttcgttggttagttgtgggtgtctgcttctactttcaccagctgctggatgaaggctataggatggcatataagacagtcatcaatctcattatcaggggagggcatttaaggtagcctctcctctgttgctttgattgttagtcggtgtcatctttgtagctctccagacatttccctagtgcctgatttctctttaaacctataatggctccctctattttagtagctcctttcttcttttcttctattcttcccctgactcaaccttactgctccctcatgtcctctgcatccctcctcttctccccttctcattctcctagctccctcccccacctcccatgttcccaattttctcaggagatcatgtccctttccacttctccaggggaccatgtatgtctctcttagggtcctccttgtgtactagcttctctggcagtgtagattgtagactggtatcctttactctatgtctaaaatccacatatgagtgagtacaaacaagcagggggtagcaattctaatatccaacaaattggactttaaactaaaatcaatcaaaggagatgaaggagatcacttcctactcatcacaggagaaatccatcatgatgaagtctcaattcttaacatgtattccccaaatacaatggcatccatgttcataaaagaaacattactaaaactcaaatcacacataaaaccgcacacacttaatagtgggagacttcaacactccactctcaccactggacaggaacaccaggcagaaacttaacaaagaaacaaaagaactaattgagaagttatggcccaatgggcttcacaggcatctatagaacattccatccaaatacaaaagaatataccttcttcccagagccacacagaaccttctttaaaattgaccacataattggcaacatagcaaacctcaacaggtacaagaaaactaaaactccatgaaattcttaagtctctggcctacaaataattctcacactgggagtcaaggaggaagtaagtgccttctcccaacttctaattgcatgtggctgtgtgaacctaagaactgtggaacacaacactgcttttaaaaaggctgacataagtacatctctaaggagtataattggtcctaaaagtgtgaggttttgatcttttaaggaggttaggggttgaaaagtgaactaaatattgggattcaagtagcaccaagactcctacttctcagctgaaggtatacatctgaacttttgaagatggagtgactgggtcatgtagaaacatgaaattacccaggagcaaaaaccaatatcccaaagcagagggtatacagaatggaaaccattcaagaagtgaataagcaaaatctgattttctttacataatggatttccactatgtaaacaaagtcagctattttatgggggacaaaatggattatcctttcaaatgtgttgcttttccaccctgattttatgattcttaaataacagcctttctgaatatatatgtattttgaaaaactttttgctatttttatgtatgtgcttgtgcctgcttgagtttctgtgcattgtgtgcatgcaggaacctgcagaggtcaaaagacatgactgggtcccctacaactgttgttggaggcacttgtgagtcaccatgtgcatctaggaagaaacccaggtcctctacaacagcagtaagttctcttaacagatgagtcatctctccagcctctattacactcttaaatcccaaacacctgccacttttgtgcatatattcaatacatttttattcactagatttaagtacaaagaattctatttttctcactaccactctccctgttccccatgaagctcaaatctttcagaaaaagtaactcatttctcaaaattaatccatcttccttgaatttctggccatgagtcatataagaagctctgtgctgcacactttctaggagtacttagtcaacatgtatcaacagaaagagactcaaaagacaggacaaaatgtctatggctatctttaataggccatcaaatagtcttgattaaggtaatgtgaacaagaatcgggaactaagaactcatagctttgagggcagatgtagtggtcaaacaacttttaaaaccatctatcaaatggggccaactagtgatcaaaggcatttaacttggccctgaatcaaaattccctataggaccacgcaacacaacacaaaccagaaaccccagatctggcatgctgaaatgcacacactgtaaagtgcagatccccgtatgccacactcccttgtacactcccttatttccctttagctgcatcctccactcttcccccatattgtcttacttggagattacctctttgttctgtttggatgttagtgcatccatccatgctaataagcttgcagcaatgtgtcaagatgatttgcatgaattataagtgaaattctgtcagtaccatcactgacacccacattcagggggtctggatcagtcctatgctggtttcccagctatcagtctgtaaccaagagctctcccttgttcaggtcagctgtttctgtggatttcaccagcctggtctagacccctttgctcatcagtcctccttctctgcaactggatttcaggtcagttcaaggtttagctgtgggtgtctgcttttacttccaccagctactggatgaagactataggatggcatataagtcagtcatcaatctcattatcaggggagggcatttaaggtagcctctcctctgttgcttagattgttagtcggtgccatctttgtagctctccagacatttccctagtgcctgatttctctttaaacctataatgtctccctttattatattatctcttatatttctctcttctgttcttcccccaactcaacctccctgccccatcatgtcttcctcacccctcctcttctccccctctcattctcctagatccctctcccctcccctcatgctcctaatttgctcaggagatcatgtccctttccccttctccaggggaccatgtatgtcttagggtcctccttgtttattagcttctctggcagtgtgtctaaaatccacatatgagtgagtacatactatgtttgtcttttttgtgactgggttacctcactcagaatggtttcttgttgttccatccatttgcctgcgaatttcaagattccgttttgtttgtttgtttgttttttgttttttccctctctgagtagtactccattgtgaaccacattttctctatccattcttcggttgcttccagtttctggctattacaaataatgctgctatgaacatcgctgaacagatgtccttgttgtatgaatgtgtttcttttaggtatatgcctaagagtggaattgctggcatgtagaagactgcagagagatccatgtctatcgacatgcacaaaacttaagtccaaatggatccatatgataattatcacaacaaaattttaggcatagctacatagaaaaacactagcaaagcagtgacctttgcagtaagaatgagttctattggctgacaaaaatagctcagagttagtgcctacaggatgtaataagcataagaatagatcctatctatagaggatgcaatatgcatggggtttctttcataaggatgggctctattcactgagagacaaagttcaggaatagggcttaaacaatgctcaggtgtcaggtggaggctgcctcctcatagaatagcaaaggataaaccaggttgtttgaccactttcactctggcattgcagatgagcagatatcagtggcaatccaagtttctctaatgcctacttaaagctgggcttccttcagtaatgattctcagtatttctagcctagcaagacttctatgttgatattatgactctaagtcctgtgaacttaaaagaaatctatacaaaaactgttcattttgccaatactgatgtcacttaacattgtgacctggaaaccaaaaggcagaccttcaaatgctgtgactgatggaaaaaggtactacagaatagagaggaaggcaatatttttttttttaaagaataaaggaaagggcaatggttaccaccaatgcactggcaaacaaataaaaattcacatatatgtggcaagtgatagagggatgttaggacagacaaccaggctgaccccaccccctgacaaagggcatggcacgcacagggactgctacgccatcaccacgtcacttgtcacacattaagaccctgtgaggactctgtgcatgcatgggacctcagtgcacatgagcggtcttccctttaaaagttctaacttctctgcttccctctccctctctggcaatcgaccatggaggtcagccattaactctgttcctctcctctgttactctatttctctcttgctcgctctcccgtgatacaataaactatcgttaatgtatctcttgttctcatgtctcattctgtaccttttttcttataatttaagcaaaagaacaagggaggctgtaaataataaatactgaagactgagaaagagtaagaatttcatctaaactgactaggtaataaaattatataggcctttagagtcaaacacctgagcttaaatgcttacctgaactaagtaagaataagaaacagccataagaattcccatctaattattaattaactaaataataaaagtccacaacttagaacacaaacaatactcaagaattggttaactgatgaaattaagcattttggaccaatacagaactgctagcttacagttcaaaaatttcagagaaaaaataactaaccaaagatgaccagtttcctagtctagagatagtcacaagattcaaggacatgtgaaccagtcaaggacacagtgaaccttttactaggtgtttaaaagcaaacagctcaacagtaaggatgatttgaccactaggtggcaatgatacagctgcatttcacatgaaaaaagtaaatccaggaaaaacaatcaagaggctttctagtgtatattttcattttataaaaagtgttttatatgcaatttaactaataatttttatctaattcaatattcatgttgacttctagtgctttttttccccactaggcactcagaattaatacaacacaatttaaaagacttttatcataaattagtactttgaaaaatctacacacacacacatatcaaagataacagatattatgggatgattaaaaatcttcttaaaagttttagaagataaccaatgttaaacgttaataaccaatgttaaatgttaaataacccaagataaccaatgttaaaagcaaaatattcaaaactcttagaacaaattacaggactcttttttgtgccaaaacaattatctctagcacttcctagctatttgtgctttcttcaaaaaacagaatacaaacatgatttatctaaaataaaaaactttattttttcacatgaaataaaatcagccaagtatgacaaattttcaagttatagatatttctaaatattcagtaaaaaaattaaattgcaaatttcatgtttcccaaatattagtgggagttcacattgcatgtaataattaaaaacatttatgaaaaattaggtaaataaataattctatagttatccaactcaaaattttaaaaaatcctttttttctttgtataaataaacctaatgcttcccaaatttttaacagtttcctccaaataaacagatcaaaatatccctcataaatcagctttccagtttctctcatttaataattactttctacatataaatcatttccagaattatatttccacccacaaaaatgtaagaaaacagaaatatgattctaagctatttcatagattacttccaccatcattattgaacttcattttaaaattaacatttaccatcctggtcatttaattctcagcctatacaaatacaaaaaccagataaccacttaagatggttagcacaagattgctattgcagccctcaatgcaagcaaaagaatttaggaaagtgctcactgcatctattttttaaagctagatatgccattagatcactgatttacagaagcaaatacataagtatgtcttacttatatctaagtagcagtagctctgtttttacaaataaggggataagacacataatcctcaaaccacttcagttacatttttatatgtatttcataggactaagtttgacaaagtagaacactaagaaaatttagctacatctcaaagtgtcacacagatacaattataacaatgataagattcaaatgctgctattgacttgggtttgtcatcttctgtttatttctgatggtggctctaagttttcgtactaccagtctgtcaggtagaatcatatcaccttgttgttctagataatctaacaaattctcagtccattggagagcagctgcatgatttatatgtttctctggaatcagttcaattccttcctcatcgttttcactggattcatctgtctggccttgggcccttctgataatttcactgtcagttaatacttcgtaacctggctcagtactgtcaatctcaagccacttctccatattttcaggagtcacattttccagtcctttggtatgctgtaaaatggtggccacagtagccccagaaatatcttcttcatcaaagtccaaaccttctttttcctctatggaaggaagaatctgtttccaagctctgctaatggtaaccggctttactaagttccatgccattgctatttcataaagtgcatccaacaaagtcagctttttccagaatgatttcaggtcattaccttcttccaaattgttctgcagaagacctgcgcgatagtttcttttcatagttgctatgactccctgatccaaaggctgaatcgatgaggctatatttggtggtaaacattttgcaaatatttggccatcatctgacctcaggacattttcatttggatgtgctggggaattatccagcaagagcacagctttttcctgcaagcctttagatcttaagtactctcgaacctgaggcacaaaaatcttatcgaaccattgccggaaaatggagagatccatccaagcacctttttggctaaaataagagacaggcaggtttaaggtatcagtcgacttgaaggatcgaggtttcttcgctttgcccacaacgcaaagtttaagtttgtgtaagcctgttgcattggtacaacacataacagtgactctttcttcaaacgagttgtgcccaggaacagtgcgtttacctttaattaccgaagtcctggaaggtaggcacttccaaaacagtccagtctcatctgcattgtagatctgttctggctgcaaattctcccgttcgataaaatctctaaaattcttacaaaaatcttccacagctctatcatctccacttaatctttcatttctaatgttaatctctctaatgctgtgccgctgtttaaagcgggttaaccaaccagcagaagggttaaaatcaccatccattcccaaagcgtagaaaaagaactctgcccgtttggcacaaatggatccagatacgggattccctttggctcgctgctgattgaaccactctaacattgctctgtctagttcctcgtacatggatggcttcatagattttctcttagctaggagacttgtagaatcggagctgcttgcgtaagttataatcttctccttgttttttcttatatccctaactgttgtttcaccaatcccatatatcaccgccaactgcttggaagagcctccatcttcgagtttctttattatatcaagtttatctttgatagtcaataccacacgcttccgcttccctgacatggtgggaggctggcacctgctcgctcgctcgctggctcgcactgtggcgatccctaagaatccttacgtgactcaacggtgtggagcactcgacctgtctcagcctccgaagcaaagggcggggaggaggtgacaggaagtgtgcgggggcaggcctttggcaggggtgaggcccacactcagtctgagtacttgggactcgcgcggccccggctctcgcccgagcccgggccccggtgcaggccctgcattaaggccgccacaccccaaggttagcgcacagcggagcggaaggaaggaagggagggaggaggggaggaagccgggcgtgcgagcactgccctcctcgggggtctcagaccctagtctgtgcgagcacagccctcctcggtgacccctcggaccccgcctgtgcgagcacagccttcctcaggggtctcctcagaccctattctgtgggagcacagccctcctcagtgaaccctctgaccccgcccccacctgtttcaaccccccctcagaccctagtctgtgcgagcacagccctcctcggtgacccctcggaccccgcctgtgcgagcacagccttccatgggtgtctcctcagacccttatgtggctgtacacagctcctcctgggagtttttcggcacacccctatctgagtgcacattcctttttcaatgtccttgtctctccagaccgttatctgtggatgcacacaacccttgtgcagtcttagtgaagctgggtcagaggttcctgtcttctatcaacagccatccctcctttttggaggcctgagcaccctcttcctgtttctggggaatgagttcctccagaaagccaggttggtaatcatgaatgtgaccatagtgttcacaccccaaatgatcttttcccaaactttcattcggtatgctgtaaaatggtggcnnnnnnnnnngggagccacagcccctgtcacagatgctaatgagtgatctaggctgacaggacccactctctgagaatatgaagtatttttgagctatggtgtcaaatgggaggcattggcttgtctcttaatacctttaattcatcatttcctgttttctgtcatgttatgctgccctcttttccagccaatgggaggattatgatagattgactcaaaccaatgtgacaaaaacttaagcaaaataatgcatgcagcccttaaatcctttattgtgctgatttggtttccatatccctagtaattttgttaagattgtgagctccttgggagcaggggcttcatttatttcttctagtagcatcactgctccaaaacatgtgctggcattttgataaatgttcaataactattactttggtttttaatatttgctctccaaactaccatgtaaaagaaaacataaaagagggttgatattctacaaattttatgaattaatccctcctggcagaatttccaaaagtagcatagtgtttgcacttcaaatcagagataagtaactatcatctacccacattgtttgtagagtaagtaggtgacttcattgtgagatatttcttgagtatgaattaacctcaaattctaaaagaaaatatttcttctgattgattcaagtggcattaacaccgtaccttcttttacctgtaaagttactttgagagagaacacatgcaaatatgaattatctttaaatcacatcctttggcagacatcaaagttaatatatgcatctcacatgataaccatgaaacacatgatagtattgacctgcattcacttatttgatgctttctggtcaagtccttgtttttctctttgtctgaaggtaagatatcttgataaaattctcatttgaattttttaatccagcataaacaaaaaaactcatacccatttgcatggattcttttgtaggtgaattctaaacatggaaatgtcttacccatgaacttggcttcatttttctcatttttcttccctgggtcactcacctttttcctctgacattcttccctccccagataatttagtaaagctatccatgatttacaaagagctaacattcaaaaatgtcctttttgctaacagttttttttttttaaccatgttgatagcaatgacaaaaagacagaagccctggaaaatgtgcagtttgccaaatgaaacttagtttaaataaaatacaccttctaaaaaggttcaagtcttcatttttccatagagatttttgctttggaccttaaattttgtggttgatgtcatcaataaaatggtagagggaagtctgcagctttccatctcttgaacatttttttcctgcctaatggatacttttcaaaaacttctgacttaacccatgtgcacttaaattcagtttcatagttttagaaaagcatgcttgttaattctcaccattttgatgattgttttctgaaattaaaatttagcatgactaagaaataaaatattactttgaagtgttaattttcactatgtgtacacacatgatactaccagcagtcattgtgtagcactggacgggatcaggaggcctggtttctaaccctgctctgtcactagcaagctctgtgatctttggtaagtcttttaacctctatgtacttggctttaatatttgtatttgaagataaatagtatcttctttcgaatatcattgtcaggatttaaaaataaagatgaaaatatactgaccaactttaaatataggtgatttgtccatctataccttcattgtgtgcagtcatgtgtcttcttaatagtatgatagtcttaatcatttctgttcttgtcctagaaaccacccattgtagttttataagaacaatctggtgtatgtgaatctgccttgtgtactaaaataaaatcatctttcaccttaacatttcttactgtccatatttacttcatgtatctattgaaaccatgtttgtcttttgaagtgtttttcattatttctcccaattcaaacaagttgattgtgtaatgtacatatgcaaaattggcttatgaaaatttatatgtctttacaaatactttactatacctaagctgcctagttattctagtgtttaacaaaaatattttcaaaactattggagaaattaggtagacatattgtaaagcagtgaagtatgcaaaaggtatgctttgaagaataatctagggtttttaaagtaattttcattacataccttattttttttttacttttgttggtttcaatataactcacatagattataacctactatcatatagaccatttggtgtactattggtatttaatactatcactgttacattggtattatcctgtagcagatactatcaaaaattatactttggcttatgctatgcaggtcatttttggtgaataatcttataatttctgctgttctgattttatatgagaagctaccattatatggaggtgtactgccttaataaccataccagaattagtacagttaacatagtcttttctcttccaaataataatatttggaacactataaagttggtccagtaatgccaacattgcttaattattttggctttgtaattttgatgctacctttacagttaggtacacatttttttttttttttagtattttcaatgattgttaatcttataaagactttttttttctctaagcttctaataatcccttaaaagtgagacagatgaagtggatgtttgaagctaatgtttggaatataaaaaataagcagtgtgattattttcataatcttggattattttgtttgtaaggttctatttttgttttatctgttgatactactatatgtaaaaaaccaggaatattgtgtgctattgtagaatattgttataataattttcataagcttttacacatatactatgaggtcatattaccttatgattcttctgttccttggcaaccacagaagtacatatgtgttactaaatttctagttatcatacctatctcacctaaactatattacctagtttaatacatgcttgtgataaatttagtgaaatatactttataaaatcacaaactgacagctttggtttttcttccttgtactatatgctctgctttgccatgaaacttttcttacctttttcatttgactacattatggacttttagtaagttttgttggattggtctgtattttttaagtgtagtataacaccatttccactttacaaaggaatatagaggctacagtcttagaagataggttctttccatgttgtattgtcatctcttttatatcaattaccacattgtaactttgttcatgtaacttgatcgagcctttaaatttcatgttatttctgttccaaatcaaatcctactttgcctgaggatgagtcctctttgtaattcagtgtatgtgtgtgttgaacacatgtatgcagtgtatgtgagtttgcttgtcagtgcaggtgtttgtggacaccagggatggacgtagagctagcttgcttgtttctcacattattagtattattgtcatattattattattattattattattattattattattattattataaacaagatttctcatgaaacccagaggtagtcatttcagttggactaacaggtcaaggagccacccctgagattcccctatatctgtcctgttccacatccgttgctgactttgctgtgtactgcaccagccagtttttaatgtggatgacgaggatgccaatccagtgcctcatgctttcatggcagtcaatttatccactaagccacctcccagccctgtctttgtaatcccatcattattttctattcttgtctccctttttttcctgccagaagctatttatccctttttagtaacacttctttactaagtataacatgttccttatcagtgccagagtttgccctactatgtttacttatctgaaattactttttctttcattattttttttctaatctaaccagtccttgaaaattgtgcctaagcaactttgctactgatggtctttggtgaactaattgacttattaatttgtctacatcttgacatttctatcacatttatttttattactcattaatactgaccaccttgaatttttttattatatttgcatgtttaagttttatacagttttctaaaggatgcaggaccataacttttctgtgtattcttttcagcacaacatatagcataattaaaatgtgttcaaaaataaatagtagttcaatgggttattggtacgttgactgttctgtgattttttttacacaaatatctcatgtgatttgcctttgtgaactatttaatgaagccaaattaatgtgtgctatgtattcattgctgtaatctggttgtcattgttacgttcctaataactttattttgtagaagcttaagtgaaaatggtacatgttagaagacacgaaacaaggaaaaattctaaaactcaagtacctgagcaaaaatctcgagttgattggcgtcgaactaaaagaagtatctcacagttatttgatagtgatgaagaacttgatagtgatgaggaacttgaagttgatagtgatgaagagcttgagagtggtgaaagtgttgatagtggtgaagagcttgatagtagcaagaatcctggtattagtgaaataccagaaaaggaaacagagcctaaattaatcaaagttgaaactgagggaagcaacagtaaacctcttacaaacaccagcaatagttcaacagatgaagaaaaaatgaacaaaactgaacatgatttaccagacgatgaaaatcgtccatcaggtcaagagaagggtgatgtcaacaggcataccaaacaaagcgtagaggaggatatggaagatgaatacatcaagcctggaaaaagaaaaaggctgtcttctgtaatgtatgacagtgatgacagtgatgacagcgatatcctagttagaaaagtaagtgctaaacgtccacgcagggtggtcgaagatgaatgttcttctttggaaacagaacaagaaacccctgaaaaatcattagctgctcgaaagcgagaacatcaccagaagctaaaggaactctcagaaagatcacgccagagacaaagacgcaatagtggtagaaattttgaggtgtgttttattttgttggtttattgttgttaaatttttacttgaaggtagcttttataaatactaaagtaccgagtctattctatttccaataagttagaatttttaaataggcatctttgactcttgtattattttatttaataataataatttattgtgcacctcactctgtcttttaaaaacattgaaagactatttgttgttctgtatggtctttcccattcttaattacttatattttaatgtttattttaaacattttacatcacataaccaaagtctatgcttcttcaatttcaaaagttcaatagttagccttaaaatatgtgtttaagtatgtgaattgatttttttgccttcagatttaattttatagccatatgggcttgttaaaaggcataatatttactgaagcatttattttcatttaattaggactctgaaaaggaatcttgttcaagtactgatgaagatgaggatgaggacgattacaaatatgatgaaaatggagatgattatatgattgatgattttgtagtacaagatgaggaaggtgatgaagagaataaaaatcaacaaggagaaaatttgactacatcacaactgaaattagtaaaacagaattctctttgtaagttaaatatagacagttgtttgtatcttgttcgaatcattacataaagcattaaagcctattaatatcatcttctaaacattggtaaagaacgatggttttatgttaatgtattttaaattttaacaataagagattattccactggttttaataattcatttcccttataaattcaatggaccccagccaacaagcatttattttcatcaggctaacttttgtcagtatttaccactataaatacaattgaaaacacatttattaattaaaataacattagaaaacttattgataaaaacattttatagaaaataactattttccaaaacagaagactggcattattctaagttctttgaaatcactttgaagatgcattttttaatttatatgttttgtatgtgtacctgtgtgagtttatatgcatgatatgcatatatgcaggtgtccacagatgcaggagggcattggattccctggaactagatttaaagggagttgtaaacctcctgatgtggttactgggaactggactgagtcctgtgcaagagcaataagcactgttaaccacttagccatctctcctgccccattagatctctttaatgtgatcttaccaaagggcagctggattcttatatctgagttgctttcagtctgctgtaatatgctgttttgttgaagtgcatgaaacagtttgcctcactctgataaataactggaaaagggaaaaacattttcatagtagttccaaaataattgtggatattctcatcagatagtgttaatacacaaaaatccaacaggtgatactttcctgaaggttagttgtaatgtggaaactgcaaccatataaatgaacttttatatagatactccatatcttcacatgtatcatcatgatttttattaatatctcttgatatcatcagaatatttatcagaatattcctataatattgagaagttgtcatatgcacagttactgcatataagtttttcagaagtatgtttttttttttaacttaaaaagttggcttatcaacaaaagcagcaagttatacttaaggtgacaggatcacattgttctgtcttgagaaaacatttgatgaatattattgaatatctagtttgtcatttttctttcatgtgaaaatgatttcatgacaaatgaagctttgccccagttataacagttgcatgagtgattttccctctattttgctatgcagtataagtttattctatagagtactaaaaaacttgcttattaaactggagattaatgatagtaattatttttactatttcattgagggtattcctaagtaagaggatagtttttatcatcagtgcttcactgtggtgactgccatcatttttgtctggtactagtgctatttgtgaaggggcagctgttttgccaattgtacttttgtactatcagtaagatgtcagaaaaatatagtgttttagtattgataattgcatggatcttgctaatatccttaatagatgaggacagtatacttactctaaaaccacaggtttttatcaagctttttgaatcttcacacaaagagtgaagcctaccaaaattaggaaatttccgtgtgtgtgtgtgtgtgtgtgtgtgtgtgtgtgtgtgtgtgtgtgtgtaattaatatgcttttaaataagagaatttgaaaagttggaatacatctaaatatatatatcactacttaggtacctatgattttacataaattcaagtattgtttttgtgatgttttacagttcatagaaacaggttcatttattcgagagttcattcttcctaaatattattttaggaaagtcatatttactaaaattagctatagcagtttgacttgtatcccataatttgtaatgaaacaggtctaagaatcattcatatttcaagaaacttggcaaattaaggaagaaaatgaggcattttcaagttaatctctaactttcttatcaacaggtactactagttcacttgccacttgggcatttgcattaaacaaatacttaagagacaaaccatcatgatggattctttatctatactgtgttagattatgtgcaaaaccagtatgagtaaagtacatctaattccttctctgcctactccgtgtactccctcacccacacagtttctctgtttttgacttcttacactagtgtgaaacctttgttacaattgatgagcctatcttaatacattatcattaattcatagttcacattagagctctctcttatacctcccaagcattttgacaactgtctaatggcatacccatcagaatagttccagtgtcctaaactgtccttatctgttactttttttaatgttctccacagacttgtgtatttgaatacttatttactggtagtggcactgtttgggggagctgtgaaaactttagatggtgggacatgttggaagaagtgagtttccaaggaccagaccttagaaattacagctcaaaccctgcttctggctaaatgtcacccacttgcttgcttgttctcattttcccttcactgcttcaccgtgatgtaaaaagcctcatgcctttgctgatgcaactataagctgttcttgatgccatggtctgtaccctgtaacagtcagacaaagtaaatctttctttccttaggttatttcttgtcaggtatttaatgatagcaatgtgaaaagtagtaaatgtacatttccaccttttcttcctagaacattaggaaatcattgatttattttttgtctccatagtttaaacatttccagaatgtcacataattaagaacaccacagcatgtaacttttcctatggtttcttcatttaactgtggatcttgtgtttcaccccatgacaaaaccagataccatagctcacttactttcattgctgagtaaaaatgcattgtgtggatttgctacagtttatgcactcacctgttgcaaaacatctttattgattccatgtttttggcaattatgaataaaactaatataaacatttgtgttcagaattttctgtgggcataagactctctctcacttgaataaattccagagatctctgggtttacttttaatattaaatatctctatctcaaggctttgtatttcactttctatgtaatctattttattttgtatgttctgtagttgtagtagtctttctcaacaagttgtgtttcttaactggtaacagtattcttgttcttccttccttgagttgacatgtcctatgagccactattctaactctttttattcctgtttgctgtagaaacatgggctctgggtaacctgtgttcactaacatattcttcatttcttctgttaacccagtattgctttgtgctttgctgccactggccactattagttcttgaatgtttctcttttgtagcttctgctctaccactctctcctgcctttcctaattttgcactaatctcccatttgccattcagcttttgtatatcccagtgtttcatcatcaactgccttcatttagcttgtacttggggcagtttcccattactttaacccagtatatagacaaaaaattccccaaaatttaactccaggcaagatttctcctgagtataaggtgcaaattttcatcaacgtggtgggcatgtttaatctgagtatcttttagacatctctagctcaataagtagaaaacccgagtaagagatattgtcaaggagttgagatagtagatcaactgtttttaaggatggttatataatttcatacatttatcagaactggacatcagaaataatttttagtatataagaagtaaagcccaatgaaataagtatctgacttctagaagaaaaggttggatggttggctatgttctgtctttgttataatcctactcatttgtgtgtgtgtgtgtgtgtgtgtgtgtgtgtgtgtgtgtgtgtgtgtgtgtgtgtttgtgtgtgtgtgttttcatttctttttatttcatttaagataggaacttacactgtcacctagtgtggcctggaactgtgttgcccgtcctgatttcaaattaatattaatcaccctgtcttcactctgaaaagttccaaggattgcagtcttaggctaccactcccagttcttaagtcttcgtggcatttttataggagtacattgttagttgggtgggtgactaaaatatagtgtcagaatattcctggatcttatggatggagataaatgctaatcatgagtagagtttttgtatatatcagagctaataaaacaaaaatttagagtttaaatgtgtgattaattagtacttttggcttatcaattttatgtacaatgcagttaacaaaatttaagcaatttttgattagtcaaggaaataagttctaaaggttgctgtaagttaattcttataaattcaaaacatttttttctcattaaggcaatagcctatatgatgaacagtgaataccactctgtgactcatgttaaattataactgaagtggcattcccacattcattctgccaacttctacaagaattcatactaagtgcaactcaagagaagcttctcctaactctatattcagtgtacggttgaaaaacaaaattggccatcagtggtagcacacgcctataatcccgcactagaagggagaggccgatgggtctgtgagttcaagggaagcatgggctatacaggaatttccagttcagccaaggctacacagttagatcttatctcaaaaacaaatgggtgtgggtttcaactcattaaagactagggaagacatttgtcatttctcatcacaagccattggccaagagttacatgtatgccacttcaggactagtttcctccttcatgactgaaacatgacagttaagtcttcctctattttcatcagccctgtaaatatctgtttatattctgagttcacagttcttctgatagatatggaaggtggttgaaggtcacatatcagacttgcatagttcacatgccagaaatactgtacacaggtggaagaaacaggaaaacactgttaggcagacagtaagaattgcattcgtcctttagcactctatcctatcatatgttcagacaaaactgagtagtaaaagtgaaaagaatacatttcagccaaccactgtgtcattagaaaactggacattagaccaagaaaataaacaacttagttgccagctagcaattcagataattctataagtgcaacaaaaagtaagcctaaaagaaatatttgtttggattcaatgtgcatgtttttaaatgtatgggttttttaaattactaataggatcatttgttctttatgtgaccattttcaagtgagaaccaccatttataatgaaacactagatgtgttctttatgaaatgaagaggacagaaaattttcctatttcaggtgtacttgagcagttcattaagatgtaagaacaaactaaatagaactatagatggtctctgattaacagtggtgtgtttgtgcatgtgtgatggggctggaagcagagctttaatttcaatccccagcccagatgaggtgtccttaaggaattttcacgttattccactttctgttactgtttctccttgaatgcagtcaacacttgctgtatactttgctctgtcaaagcacgtcagagactacagagaagatagataaaccttgagtgggctgatgctcagctaacctcaattttcactttggccttcacagggatgatctgactcatttattttggttttagaagaaaaaaaaacaatttaaactgcactagctcaattatccatgttggaaaaaaatattttctgcttaggataagtttcttgtgaggtaggtaaaagagaatcagtattgaaaaagacatttgcacctaggatgatgacatgtatatatgtgtgtatataagcataatggctatgtttctaatttaaccacatatatagaattaagagaaataatatgaatattttaagagcaggagtgtatgttgagtttctttccgtagttttctacatatattctgtcttccctgagtgtgtgcagggatagagaggaactgttaaaaaggaaaattttcctactctacctctacctctcatgctatatgtatgctttcatttcataagacaacatatcagctagccattcacttctttctgggggagtatttataaattttctcttggtttggatgcgaaagcagaaataatgtcatcagaactccttaacaatacccatctccagctctgtggtgtcttgggaggctcatcttccaacatatccacgagaagctattttgaaattagtaaaggatctcagtaaagtagccaaaataatagtggatatacaaagctcaattagtttcttctatactagaaataaatacttaaaggatataattaatgaaaattccttctacaccaccaacaaaataaagtcctaaacccaattttaaaattatggcaggctttgtaggaaaagaaaaacaaaacaaaacaaaaaaaaacccaaaccccttacaatgaaataagaaaggaaacatgagcatgatctgaaagtactctacacaccacaagaagtctttcttctgcagttgaattaaaagaacaaatgcaaaagaataaagtgaattttgaaaaagtagtaattgaacaatttctcattcagttgaaataagtaaatcagggcagagctgacatgagaaaaacatcaagatcaataggaaggatgttgaagcaaaatgtcagcatatatccagctaaaagatgcaggaaatagcagaatacttagatagtaaatggaacatggaggaattgcttggtatcttagaaaaataaaatcatacataataacaaatctgacttctttatctttttctggattgaaatgatcataaagtgcatgcatagcatgcaggagaccctaagtacaaacctcagtattgctaaacaagagatgatcatggggagaaatttttaagtaaatcttcaagaatattctactgacattcatccaatataggtattagaactagtcctgaaggaagcctgggctccaaacctagttccaagcctctgttctgtttacttgtaatctttgagatctttgtcactgagagttgtcatttttccttctaggtcagaaatttgaattttatattctccaattctcaatccagttctgtgtttgaaagataatgccaaatctaccacctatgcaagggacacgaatacaaagtctggaggaggagactgcctggtactagcctccagctatatgattttaagaacccttctcatcatctcttcttttcagtttcctcaactaaaattataccaagggcaacacctccttgattagccctctagaaataggcagtgcacataaatgcttcaggcgatgactggtattttcttcctcagttttgttatctttcagttggaaatactaggaacattatcccagcactgtccaccatttactcaaatatgatgaaaccagtgtctcctttgtaaggagattctgatgcacatggctaggaagaatatcctgtggttaggaagtcacccaagcaatgctgatctctgtcctttcctccagctcctgaaggggaacttccagatcctttgaaatagagctgtagctcttaaaattccgtggcagaggagtaacactgggcattagcacattgaagtgaggttaaaaaaaactctgttgcatttgcttgatggttaaacttagtcccaaagtgattgagtttaactttctttccccacaagtctgtaaataatttttaactcagaattatataccaactttcttttacaacagtgttgaaaaatctagtcacaggtgaattcttttgaagtattactgtactttactttcccattaggtgtgtgtgtgtgtgtgtgtgtgtgtgtgtgtgtgtgtgtgtgtttaatagtcttgtatcctctaatgacacaattgctgcttttggattttcaatggtaagccccctaaagtctaacaaattacttctgttgatatttaaaatttggcaccccctggaaagagtagaaactgaaatttccctgaaagtctagaaaccttacacagcccttttagcaaacaagtaaaacaccctctcggtgttcaatccattttatcaactggaaataaaccccaatccattcatgatttccaagactatgtcctgtttttctcttcagtccctaattaatcatcttccacatttccagtcttagtttacaggtaactccagcaaggcaagtgttctttgatgatgatttgaatcatgggaaagaggatttgcagagaacatttccataccccatagtaaattctagccccagagtaacaagaaaagcaccattacctggcttgtcaccatgattaagtcacatctgaggctagcttagagagactgtaatggcattatgtgtgtagtgtggtaaagagaaggcacagctctttaaagtggtgtgggaaaccctgcgtctgtgacaggataagggataacagagctgttatgcccactgagatttcagtgagtagttgtttcctgagctgtgtcatgtgtagcatggtatcgtctaaagcatattaaacagtctatttgggaggctttcttgcctttttcttttattctggttaatcatttcaagtagacatggattattttgatttttcacagtgtatctctcagggttctctgaagaatttccccctttgtaagtctgagaccattttagataacatctagatactttgggttagaaacaattaaatttggaaaatggatatttttaattgccccaagtcacaaaagcagatacagaatgagtaaaatttgtgcaaccagtttcctagcagtggaagggggcctattgcagtcatcttagttttgccttctatatcctaataattactttaaattaatttcagattcttttagtgaccactatactcactttgaaacagttgtgaaggctcttctgatcaatgctttcgatgaatcttttctggaaaccttgtatggtaagttcatagtaccactggaacattttaaaatttttcctaaatagcttttgaaattagatgaagcaaagctaagacaaaccattcttaaattttgccagttgttccttctagaataaactacactataagtgcattcacatgaaaggcttgttaatttatttgagatatagatggtaagtatgtgacaagtcattgctctaaaagattctacagtgaatttgtgaatatagaacatacacccataaaagagaaggctgcctcaacattcttgtgctttctcaggtcctcgaagaatttgaatttcaccaaaaggccatgctattttctgcatctgtgccctggcccatgctgttctctgtaatattctaggtaaatgtaaaatatttctgttgtgaaaagtatgaatacttttcattgccttgctcatggcactctcattctgagtatggtcctatccatatatgtgaattcctgtgttgtgttgaaaatatatctctgttttcttgccttaccagagtataagaaattaaacttttaatatatacacatctccaaaacacagaatctgacatttcattcatagactatgcatatgttgtaccgaatacctatcagtgcctaaataagattttattcataagttatagaacacatatttcttgaatgccatatggtccaggcattatttgaggattggtgatatggtaatttcaaaccacaaaaggtaaggaaacattagatttatatcttttgtggtttgaaattaacagacaataagtgagtaaacagcataatatgtgaatgaaaactagtatgtacttcttgtgggaataggtatgcatagttggataataagaagagaagctaatggacattagatagatgagagagagagagagagagagagagagagagagagagagagatggatgaatggattctagcacaattagagactttttgtttgttttgttttgcgagacagggtgacagggtttctctatggctttggagggtttctattgctgggataaatcaacatgacaagaaaagcaactgggacaggaaagggtttatttgtttatttcagcttataactctcagatcacactccttcactgagggaagttaggacaggaacctggatataggagctgaagcaaagccatggaagagtgctgagaattggcttactacccctgacttgctcaatctgctttcttatacacacaggactaccacctgtccagaggttgcaccacccacaatgggcaaagcccacaaacattaatcactaaaacaattgtacaaacttgcctaggcaagtcttacagaggaatcttctcaattgaaagtccctcttctccgatttgttaagttgacatctagccaggacagattgataggtaaactataatatattataacatatatatgtgtgtatgttataatatatttatatattaactatatatgtgtatatataacatatatatgaagattggacagattggccaaataatgtaatgaagtatcttttaaatataaagattagtaaggtgaatatattagtttactttatatttctgtgacaaaagcaatactgaccaaaagcaatttaggaattaaagggttttttggcttatgtatatatactaggtcacagttcattgagggaagccaaagcggaaacttggagacaggaagcgaaaacaaaggacatagaggattgctgcttcctggattcctttccatggcttgcttagctttcttatataacatagtcctacctgcccaggggtaggactattcacagtgtgctaggccttcccacttccatcattaataaataaaatgccctacacatttgcctatagttaatctaatggaagtattttttgtattgaatttccctctcccaaacaccaaccaggacaattgacccccttatcagtttgatacatcaatacattactatcataacataacccttcccttctagcttgtttataatatttcatatttatataaatatctaatatagaatatattccaacttttaaaagctccagtcgttacaaattgaaacactattcagtacttggactgaaacttcacaatccaggcttccattgtctacattgctttcagcgttcttatctttcaggatctcacagaacagccctttaagctccaagcactcaatgacttatccaatccaaagttccaaacatctccataatccttccaaaatattgtcagctctgtcacagaaatattctacttccagatccaatttctgtatatagtctcctttatattaaaatactaaccaaaggcaatttgggggaaagggtttatttggcttgcatatattgggtcatagtccattgagggaagccaaggcacaaacctggaggcaggaactgaaacagaggcatagaggagtgctgcttactggcttgctctccatgccctgctcagcctgctttcttatacaactcaccttgtatttagagaggtttgtatcgagttagacaaaaccaaaccagaacatacatacatacatacatacatacatacatactgataatgctattatgcttacagtcagagtattcaagaacaactaagaagaccgatgtcatagtgcagtgagtcaggagtgagggtagaagacttcaaaggagctaacagtggaaagaaggcttttaattcatgatatagtatttaaatctgtagtgacttaataactataataaatttattagctacattcatttggaaatacatttctgaagaaagtagaaaaatgaagcttagcatcacaggccatgacaaaataaatataaattgagaacaaactattagtcaaattaggaaagcaaaaatgactgtagtgtgcaatgagggaatgagggggaagacaggcagaataggcttttccagtgtgttgtcaggagttaccgctggatcaaggatggagccagctgcaggagtctgtaaagcatcatcagtaattcagtggttatgcaaatgcaaaacagttttaaaggaaagagaaaaggttctgtgcaagcctttttcttggggttccttctgctgtcagatgtacataataaaaaaaggttggtgtttacaggaagttattagaagctgtgccctgttttctgcccatgtgcttccaggaaatgaaccgtttacttcatcatttcctaatttaaaatatttacaactagctagccatctttctaaagctcttacacatccataatgttcagttgattcagtatttcaagtgttctactgttttttgttatctgctcacagctggcaccaggaagaagtcgtatgcacaagatatgttgacatctcttcattatttggataatcgctttattcaaccccgtctagagagtttagtctcaagaagtcgatggaaagaacaatataaggtatatagtttgccttttaatctctggtaagaacatggggacagtggccctctcaagatttcaatatccaaccagatgaaatcattttctgaagtgttgccattctgccttgttaaatagtaactgattttaatttctttctcaagtctttattgttttaaatatccacactaatgtcttcaataattaaatggttttaaataatttcagagcatctctagggcttggcctatcttaaaatgaggaggttgtcttataagatggttcctcagggaagaaagtcacatagatgaagaagtttgaaaagacagcatctaacttaaactgcttctgtattggagcacttttctgagcactgattcatgaatctatacctcagatctacaagagggatttagacagcagcatttctcaaattatagatcccatgaggctgtttctcttgagatactagttattccttctactgttttttatatttttgtgtatatatgcttgaagtgtgtatgaaagtatatgatatgtgtgtgaatgaggacacatcctgccacagtctactgtgggaagaggacaacactcagcacccagctttttccttccactgtgggttcctgcaatcaacttccatcatcagacttacatgacaacaaatagttttactcgggagccatcaattcagacctgtcttagggtgtttgatttccataaaacagtatgaaagatactgagttacatcatgtttgacatactctcaaacttaagattttataattttagcaatttgggaatttgacattttaatgtaagaattactagatcctttgttattttccagctttgtattttagtatatttaatggcagaggatgaactatgttatatttaaaggtacccctattgctgatattctattttctaatgattaataagaggaaaatggtagataatagactttaaaattccttaaaatctccttagcagttcaatagtttctatgctcatttacttcaaaaacttagtttcatcaagaacccttccgcctgaactacacctgatgatagtaaatggttcactttgaggggcagtcagggacttacaaattctaagatttcaagttcaaggatgccttgaatttagaaccaccatgtatatcttctcatttgtagattttaacacctctggatccccagtttattcctcagctgtaaatatacaaaataattgttatagtattattttctttaatacaaataaaaatgttacaattttaaagaatatttagctgttgactaatgatttacatgtgaaatgtattaattacttaattttaaaagtaagtccaaaagggaggaactattctctcctctatttacaatgaggaaatgtaaccacaggaagcaacattccacagctattaatttcacaggccagtatttaatagtttaaaactattaaatactttaaaactcagaccttgaaattatattatgcttgtcacactggcatgttatagtggattttaaaaacccaggatgatataacaataagaaacacagaattgtgagacagatgattcagtaaagtcttggggtacactgagttatactgcaaaagataaagtaacatgaagaaaactcactgattcaacccagaaaaatatgtatgccaacttacatatggagtgcattctgttcatagtagtcacccacaaaaccaagctgtttgagctttcatcttactgtcctatcacagcaccacagaagcaggaagggaagagggctagtctggacctaagtctgttagtgacatgctgtgaagtgtgaagaatttgacaggtaaatcagaagtgttgcagatcacacaatatgtaaaggatcggtgtttcatctgactggtgtaggggatgaatgtggatttgtaactgtgctagcaacatacttagtgtgttcattcaagtgtgatattaaaatacactgctaatagaacatgactatacagcacagcctgcatgtgagcacatttactcgggtacaagtaacttcattgttaatacagtttgcttatttcgaacagtgtttctcacattgttcattcattgataatccagtcaccagacagcccatcagtactggacatggaacattattaattgcaaggtgcttattttcacaaaacaaagcaggtgactgtaggagaattaagttatttgcagaatattttgaggaaaatgtgacttaactcatgcactgaagaatgaatggaatttttttttcaaattctaactagcttaaatgaatttgtctttctcttatcctgaacttttgttgctcattttcctacttaatatctcattgatgctacttacagatgagacttggaaaaaagtaagttaaagtctattggaaacagtacttattaataatttgtaagcaaagagacagatgaaactaattgtttttccttgtttgtttttatagccaagattaataatttatttttcaatttaaaaataccttcttcaagtaagaaattccatattattcttatatttttcccactggtttccaaaataagttttattttggatatattcatatttaatgtaatctccattatttttaactattatcaggagcgagttgaaagctactctacactaagtatccattcaaagaaccctgcggactgctcctgccaggcttgtgggctgcatcgccactgtgtatactcagtgcatctctcaggaaagctgtacaacaccaggacaatggagacagatgatttcatgtcacatgacaagcaggtatcttttgctaatctatgccttcgatatttagaaactttaggcttcatagcttgtcctctagatagttcttgcaaatagaaaaaccactacaaagaaaagaaggtaagtttgtttatatggtagattactttgatagatttccttatgttgaaccaaccctgcatcccgggaatgaagcctagttgatcatggtggatgatttttctgatatgttcttggattcgatttgccagtattttattgagtatttttgcatcaatattcatgagggatattggtctgtagttctctttcttagttgtgtctttgtgtggcttgggtaccaacataattgtagcatcataaaaagagtttggcaatgaaccttctgcttttattgtgtggaacaatttgaggagtcttagtattagctcttgtttgaatttctggtagaattctgcactgaagccatctggccctgggctttttttggttgggagacttttgatgactgcttctatttcattaggggttataggtctgtttaaattacttatctgtttgtgctttaattttggtaagtgatatctgtccagaaaaattgtccatttcctttaaattttcaaattttgtgaagtacaggtttttaaaatatgacctgaagattctctggatttcctcagtgtctgttgttatgtcccacttttcattactgattttgttaatttgcatgttctctctgccttttggttagtttggataaaggtttgcccatcttgctgattttctcgaagaaccaactctttgattctttgaattgttttctttgtttcaactttattgatttctgccctcagtttgattatttactggtgtctactcctcccgggtgaatttgtttccatttgttctagagctttgagctgtgatgcctactcactggtgtggctattctctagtttcttcatgtgagaacttagagctatgaaatttcctcttagtactgctttcaaagtgtcccatgagtttgggtatgttgtgtcttcattttcattgaattctaggaagtctttaatttctttctttatttcttccttgacccaggaatggtgcaattgcatgttgttcaatttctatgagtttgtagggtttctgcaatttgtattgttgttgctttctaactttaaagcatggtggtctgataaggcatgggggttattccaattttttgtacctgttgaggtttgctatgttgccgagtatgtggtcgatttttgagaaggttccatgtgatgctgaaaagaaggtatattcttttgtgtttggatggaaagttctatagatatctgttaatcccaattaggtcataacttctgttagttcctttgtctctttgttaagtttctgtctggaaggcctcagaaatctatggagcctcttgtagtaaatcagtacttaaccctagcataggaatggactgtggtagcacattccacatagaggaatactctctcagcctcgacacatgggggagggcctaggtcctatcccaaaggatatgacagactctaaagaacccccatggaaggccacaccctccctggggagcagaaaggttatgggataggtagggtgttagtggggcacaggggaggaggggaaggagagggaactgggattgacatgtaaaacaatcttgtttctaatttaaattaaaaatggaaaaatataaaaaaagaaaaagaaaagagggtacttttgattttctttatttctatcagtatgccacagatactaaacctagggcctcagcttgctaagtgagcacgctaccccttatgccagggtacaattttcaaaggtgcaaatgtgtctttatagcacattcacccctaattcagtgagatcaaatcagtacgtagccttaatctcagtgagtcatatcttaggacagagatgtataggatcagagtgataaagaaggtcacttgggcaagaaaacaggtactgcctttgaagtccaaagaagactataacccaggtcaagacctcatgtcagatagtattcaaattagtggtttataggttaataattgaagatgcctgttcatcttataaagagacaattcagatttttatctggcatgccagtgtctagagcaatcatttacctgattaagatgatgttaaatctggacatagagaggcttcaagaataaataatggctaggcttggtgcttcacacctttaatctgtgctcaggaggtatgcagaagcaggaataggccagtctgctctacagaactagttccaggacaggcagggccacaaaaaaaaaccctgtctcaaaaaaaataaaaaataagtaattgacaagagtgggaactcataaaaatacatattctgtttttgtttctaatcttactttgtaagaaggctgaatttgtaaatatttgaaaacttcttctagtgactctgcttatctttggagaatgtatgttttgggagaatagagagaactaaagttgttcgtaaatcttccattattaaagtagaggaaaaaaataaataaaaatgaaataaaatggaggaaatatgatttattgggaagtatgattcattagtactgttggacagtagttgaccagatctctgttaacattaaaataaagattaggaaaatcatttatagattttattcttggggactggagagatggctcagtgattaagagtattgctgctcactcagaagaccctttttcagctctcagttctcacatggcagctcacagctgtttataattccggttttatatgatctcatgcacagttctggtccccatgggctcctgcatgcatgtaatacatatgtcaggcacagacacacacacataaaataatgtaaaaaatgtatatatgaataatgaattcagaattgttctttatcaatattgtatatgcaatttcctcattgcttaaaaaataacctatgatttttataagaaatccagaatcttatcaaaagcgattgaatacttcaagaaccatatcctgttgtatagatcaaatatattgatttcaacatgcctttgttacatatagctaatcctggaggggaaagtagagttaaaaatcattcatagaacttaacattactgagaagaaataaagtttctatttaaactggttaattcaggtatctaaaattaaggtcacatacaatgggacatttgtctaatcctaacatttaagagtctgagacaggaaaatatgaattcaaggccagtttagggtacatagcaaatgccaaaccagtctgatctatatagggagactctgtttcaatcaaaagacaaaaggacaacaacaacaaaaaaaaaaaaaaaaaaaaaaaaaaaaaaaaaaaaagcataaagtgcctaaggaaaagagagctgggagagggagagggaaagggatagatagcagaggatggaaggaaaggaagaaaaagacaagagaaaagtgaggaaggggaaagaggaaaagaaatgaaaccaataggtgaaaccaaaagagcagagtcacagttgggaaaatataaaagttaaatacaagagaaaatgctcattctccttaggaacatagaggtaaaactatttaagatttacattgatagctcttaaattactatagtatttttttcagatttttttaatttgaattagaaacaagattgttttacatgacaatcccagttcccttctccctcccctcctcccctaccaccaccccccaactaaaaccctacctatcacatatcctttctgctccccctggatggtgaggccttccatagggtgttatcagagtctattgtgtcctttgggatacagcctaggcccacccccgtgtatcttggctcagggagtattcctctatgtggaatgggctcccaacgtccacacctatgctaaggataagtactgaactactacaggatgtcctgaagatttccgaggtttcctcaatgaaatccgtgttcctggggtctggatcagtcccctgcttgtatcccagctatcagtctagggagcaagagttccctcatgttcaggtcagctgtttctgtgggtttcaccagcctggtctggacccgtttatagtatttttaaatatatattttactatagtattttttaatcaaatgttgaaaggttgtatgatcagcattatttagaagtttgtaggcttatgtaaagtgagattcctagaggaagaaatatctggtataattttaaaatacaggtgactgtatagccagagttgctacagtgactataagtttatcctatggaaataaattaataaaagcaaatgacatcattgcaaagttcactgaagcattcttgataaggagtgaggtacaaaatagtagaaacagtccaaataaaacattagaatagtgacatgaaagtctgatatacaagaatgcgtggcaggatataataccacttattcagatgatgttattagtaatagttatatggctgttttgaaatgatgctaggtaaaataaattttcttcagtaattttttatttcaaaaaactcattgtattctaattacctcataagcatatcacagaactagtttaaggaaaccactaaaactttattttttgttttagcatagaattcaatagtttccagaaaaagtataatccgagtctgtcactgccatttactaaagttattttctatcctattgcaccactgtgtcagtgcatgcaaataaagggaaaagcacatgtacttatattctggggctttaaaagactgtccacacctccacccactggcctcatattgtttggaaaccactgtctactttgtcattgtactgaaagttacttaaaattgaaagcctaggattaaccaggttcttttcgagggtgcagtaaaattgtgattgttgataattttcttttgcctgacttaccaaagattagattatttgaaagaaatgatatgctttgatggaagatggagttaccatatgtttgacaagaggccttggatcacaaggacttggggtgggggtgggggacaaagaaaaacaagtcttatcaaactcaggaaatgaaagaaacttaataatgctcacaagaccctttcccaaagctatatatgcagaaacagttgccagaagtgggaagaaaaggtggtggggtgatggattggttttagggttgactgtacattgttcaggctgctccaggaatgcaattcttgtgaataagttgtcacctgtgctggggcaggcttctcagttttgcacttgccttttattcatccatgttcctgtatgtaactccagaaaactcagtgaaccactaacttaatcttaagtggaaagttttctttggtctgtttttgagtgccatacatgaagtgaataaatatttgttcatgtctctccagaagtcacaggccaggcaatgtggcacacacctttaatctcatcactcaggagtcaggagcaggcaaatcttttgagttttagtttgaggctggcctggaccacatagtgagtttcagaatagccacagcttcacagagaaacgctgtctggaaaaaacaagtaaacaaaagtcataggatataatgaaatgtccaaaatgcttcacttaaccatgctgtttttcagtcatcattattgaacttgaatttctttttggcaacatattcctggtctcttaccttcagagcatcattaactctgtgttcctgtgtattgcagcttcagaaaaagtgacataggtgactattaaaattatgtagctagtactgaacttgtgcacttgagcatagagacagatacttaagtcaggacatttgtgccttcagatccttatatgatacatcatgttgtgttcttggagcccattttggtgaattttctacaaagagtgaaaatagtgtgaattaagatgtatttaatttatcagtgagtgatattgacttcctattttagttggatagtgaaacataaccatcaaaacaaacagaaatggtctggttgactgattctacaaaagggtatcatagagtcctagaagtccatatataatcaaagcagacaataaaatgttaatatctcatttatacatgacacatgaattaaagccaaaaatatgcctacacacaaagaacattttactttacatttgggaattgtttaggaaacaactaacaatacttaacattggtgtaaaagtgcttcacttttagttgttgcttatatttacaatttatcataatctgggcattttaaacacaaaaaaatgtgtaatgccatattctgtatgccttctgctttagtgtgtgtccatttttcttccttaaaagcaatttctctctttcttcccaaattcagaaaattgttttcagaacttcaagaattactgacagaggctaggcaggtgttcagtcaatagaggactacaagcataaagtgcctgagatcaagccccagcactcactaaatcaatcaatcaaccaaccaataaacttaagctctggaatgcctcacctgtttggaaagttcaggaccagtgcgaaatggtgcctcaaaataaataggattattggagcctgaagaatgataactgagattgccctctggccttcatatattcatgcacacatacaaagaaacatggactgacatcttggtagcattctgatcacaacatttggtgtggtgttttataatcatctttctgataaggcactaagctcctaacacaggtgctgcatcctcacttagcttccatctagcccctgcctaatactgggagcacaaaaggtgaaggttctgttgactggttgtatagataagataaagggaccattcttataaatatttaaataaaattaaaaacacatgttttagataagggaaatctgaaaaccagaagtaataaacatacatacatacatacatacatacatacatacatacatacatatacacatacatatacacatttattcacttcatatttgagataacgacatatatttctcaatgtaggtatttactgttggcagaatttgtgctgatcgcaccagaatttatcataaactaaaacattttaaattcaaactgtaccaagaatgttgctccattgccaaaacagaagaagatggagatgaacaggttaaagaaacagtaggaagagtcttcagtcagtcaaaagaaagcggctggattagaaaggtaagacttagaccttctcattctgcagaatctggaggtttgagggtgctagcaaaaagatgacatttgtagacagtgttactacttaagaaatcccttctctccctattcttatgtttcctcttctgctgcctattccttccatgtttgtcattgttctattgtaaacagatggcctgatgtttttaagaatccactcacctcatgtagattttattgaacaataatgctgtaccctatcaaaaggtctttcttctttgtcttttatgtgtatcacccttacttacatactaactcacattgtgataaaatacaacgacagaggttatcttaagagaaaaaatggctattttggcttacaggtatgtgctatagtccatcatggtgaagaagtcctgtggcaggatcttgtggcagccggtcctatttcaaagtcaagaagtaaagagattaattgttctgctcagctagctttctctttctgcagtccaggacccaagcctagagaatagtgccacatacttttaaggtggatctttctatcttacttcacctaatctagaaaatacctcaaaggcttgcccagagatttgtctcctgggtaattttaggtcctgtcaagctgggaatcaatattaactattatattgcagggtgtgtctggggagtagggtggggcaatgaatgggactggcctttgctagcctgccttccttcttttgaacagtgtgatttaaaagtgaaggagcatctggtgccagcctgaggaaaggggccacatcaccaattctaatacagccagaacctcttcttgaggacttggggctgattgtgggcacttgaggacactgtgactgaaaatggaagggcatgctgaggcttcaggctgtggaacctttgatttccctgtaccttgacaccccctgaatttgatatcaagggtagagtgggagtggccctctcttggcctttcatagtgtcaagtctccgctgtgttccatgaaccttccatgtcttccaaactagtacccattaccaagtttggctaccagcaaaaggtctgtgtgctgaccctgagtaaacacttcctagaagactgcatctcagtgatgctggtctcaatcacaattcttcagcccaagtgactagtatcaattgtcctagaaagcaaggatttcacttcagaggatctgagctcttgataatcacaactgattcttcaaccccagatgatcagaaccacagattcttaattcagtgtatttaaaggccctggtagattctttaagggactttcaaacttccttctgaatcttcacatcccaatccttcatcatctgcattgctctcagcactcttccagtctctgcggatatgcccactgatctttgaacactcaacagcttttccagcccaattttcaaatgctagcacattttgcccccaaacacatgatcagatctgtcacagaaataccccactcatcattccaatttctgtcttagcctgcttcttattgctgtgacgaacaccatgacctaaagtaacttgaggaggaaagaagagttcatcttacatctctcaggtcacagtccatcactgagggaagtctgagaaggaactcaaggcagaagctgatgtagaggccatggaggaatactgcttactagctactctctgtgacttacctaacttgctttcgtttactgtccagggccacctgcccagaggtgtgctgagccctcccatatcaatccttaatcagaaaacattgtgctacagaattgcccacaggcagattgtatggggcattttctcaattggaaattcctgttcccagatgactgccacttctgtcaaggtgacataaaactacccagcacatcctccactaagagaaacatttaacattagatgttaaaagaataaagcatatacctaagacagacccagttttccctcgtgtaaaagcagcaaagaacttcattgtgtcttggattggggggctttttaaaagattttaatttaaaaatagttgtttaatacttttccaaaaaattccctagaaacaagagagcttatatccagcataaatacatacattgctttttatgttatgataaaatttcagtttgtcaaatgctctgacatttctcagtcttgctatcctgtagcgtgagagcacactgtatgtgtgaacgcatgcatttttttggctgcagtcaccatgtcttacatttactcttcctctctaaagtgcctgggtctgtgctacttggagcccatctcagtgactctggatgttcccatctcccagtgtgccacatccttttcttgtcttgcacacgatgctgttttctgcttcctgcttgtgtttctcactctgctccttacctgtcccttctctacttaagcgtttttcttcttttctcccagaatcttagtctgttcaaccatagactaaagacctgccgactaagcctcactctttttttcctcctactatttgtgatagaattatctgcttttagtctaatagtcaaggggtatcaagttagctttaatacaagaaaagagcaaattataggaaaatcagaatgaaaacaaaatctgcaaacatacatgccattctaaaatattccaatgtgcccaacatctctttcattaggaagaaaatatacatgttgatgggttttcctgggagatagacaataagattgttgggattggttgataagaatatggatatcaggaaaagaagatagcatgtcagcagaagtggcaggccaaagggacagggagatggctccgtaggtgaagtgctttgccacacaaccatgagaatttgaattcaaaccatagtgcccatgtaaaacacaggtacaatggcatgtgccctaattccaattctctggagaagcagagacagggggatccctgggtgtttctggccagccaaatgcatgagcatcagattcaatgagagacttcgtcttgaaagacagagagcaagatatcccacattgacctctgccataaacacacacatctaaacacatccataaaagaagaatcaaatctgctttacagctatatttaaaataatgtactacagaaataagaacttcgaattataatgagatttcccttacttaagtcttctctttcaccctccccttttaacattttattcttttctttttcttctataccttaagttggtatttctcaaaatattactcttaactacctatgtcaaagtcacctagaaatttgtggaaaaatacataattcctggccttacccagaccaattgaatgaaacttcttaagggtattaaacatctaacattctaaaagttggctggttcttaagtaaattaaagatggagggcttagaatttcctgttgagcttctacctgcacatcatttcctttctgttggtctcatttgctccttctgggtagaggatgccaggctttgctgagagtctgactactttcccttccccatttccacagtctggaatcttcttgtcagaatgttcatctggtactgtatgggagtgctcttcattattaaagcaaagcctggactccccaaaggttctgtgatgagctacaggagccgcatcttcaggcagagaagatggcagagtggtcctaatgaccttccctctctttcactttcccttttgtgattttcatttttccccctctgaatagctgttgccccacccttgccatttaaaactcaaaaacagcatcctataaaggttaaaagcatgcatctgaatatttgtcctgccactggctagcagtagattatgaaagcaagttactcgatctctctaaacctgtttcacccctgtaaaataggaattaagcaataattaggacttcgatcatgcaaatgatggatgatatatttaaggcctggaattagaaagtggtcaactgccattagctgttatttgtaatataagcaagcaaagattgttatttgtttctcttagtatgcagagacacattttaattttccaaagcaagttttataaataattgagcaaacaatataaaaataaaataataagcctaaaacagccagttttttaaggtgcaggttttaaatcatagataatcttacttccacttacttccatgcactaaaagcaagagaactcttaagtggcctatgctagcagatcactgtctatcttgttcttttcttccatcttccctgaggatgttgaaattatgaaaatgggcttctgggcctcccatggaaatacaatatttacattgcttcccatgaatccttgtcatcatagaattcaggccattgaggtcttctctcggagttcataaaccaagttagaaaaccattaaataattcaatgccttcaactgatagaaatacttggactctgtctaaatgtgaactcatgtatcttccctgttccctttctgccttagatagtcctacctgccatcattcttgtactctttcaccttggaatttccaggacacccttaccccatctcttaacatgttccatcctgttctttaccctccatttccattgttgccccacagatttgagtcctcattgcctaatttgtcataacagattcataactcattgccatacagttatagaatagctaaccagttttctgaacatgtacttcaaatgaggtcagtcctctgttctaaaatctttggcagcatcacattgcatttcaaatctttgctcaatccataacctagtatttcatagtttttattctctgacctcaatctctttggttcaatcctacctctttctctcagatggcatcacattcctatacacccttgtcatggtactgctggataaactgttaatctcttggactggcagagggatacttttgcctctaaattttttcctatcaaatatttttgtccagaacaacttaaatgccagactttcctggtcacctaaactattcatgacttctcttctgagccctctctgcagttgtgctggttgccatgatgtcttgtcttagggatgggggaaatgtcttttaaagccctgcccctcaacagtcactagtaggaaactgtctgcatacatacacatctgttctaaaagtatatgttggattagctattgaattgttatatttatgctatgcttcacaattataacttgtaagatatatgaattgataacactattatttgatttctttccaatgctttttgagttagaaatgtttatttgaaacagaacttctctttataatgaagtgatttttgttcccacttttccattagacatgcatttaagtagtttgaaaggcctatcttatttgttgttgtgagtaaagtgactaattttgtgttgtatgtgcagaaatatgatcaactgcaagactatctcaattctgcggattactttcaagatgagaagtttgaattatagcaggtttccttcagagaagattgtataagtttctgtaaatgtgaagatcatgagttttgtttctctgtatcatgtaacatttgttgtatattctttatggcaaaaatcttgtttatatctcatctgattttcatgaaatgccacagtgaagtctaataaagcctgcatagatgtacatggagaacatcagatttgtgattcaaaactccatcaatgtatttggtcatgtattgatgattttctcataaatgacctacaattgaatgttctatcatgtcctcctgtcagtttagtagaaataggctgtattaaaatatatttggactgacctggagatggctcagtcagtataatacctgccttacaagtacaaggacctgagttcagtcctcagaaccttatttaaaataaaagccagatgtgatggcatgaacttgtaatccctgcactggggaggcaaagaccaggcagatctccgaggcttgtttgtcagacaaccaacccactctcatgccaatgagataccctgtctcaaaacacaagttgggtgttgcttgtaaatgacacccaaggctatcctctgagctgaacatgcatgcaaacatatatgtacatgtgcccacatgtgtgcagccacacacaggcaccttctcatccacactatatatgcatgtgtatattcatatatagtgcaactcatgcctccctgcgtatgaatcattgtattgttgcatcccttagcagtattaatatgaaacattcagtatcaatgtctaattagtgtctcctcaatcagtgagccatggaagaagcctcaaattaccatggatttattatcctgacctcagaatgagaccagagcttgtctactgtaggtgccccacccttgccatttaaaactcaaaaacagaacagatgtctaatctgcaggctctttcaatcctcacattcaggaagaacttgttgatacatattttttcattctgtgcaatgttctttcttgtttctgaacagttttatctggaatatatcaagtattgagatgtattttgtgattttttaaccaaaacattctctatgtaaatatatacgtatgtatgtaccagtctaaagatctcagctacaggttcagccaaaaaacaattcaaaatcttatttttgtgcctacattactttacacatcctaattttccataattcaataaagtggtttcagagtaagctgtgtattctgtttctttaattcttaaagggaacacctgttctcctgtggcattttatttgctttcttcttactggaagtaattggttgaagttagctagtttcatctattgtgtgatgcatggcatgtgcctccgtgtatatattacataaaactacatttcatcaagaattacatggagtttgtattttctgcactatatttctattaagtattcatattggtcttttaagccagtaagagaaagaaatgaacagagagagagagggagagagagagagagagagagagagagagagaagaaaaattacaggaagtgcaaggatactgaggccgatgttgacaagtgaataacagttttcaggggtgaagcacacttttccatcacatgcctactgctatttgtatttctctggtgcatgggtaactaccatttaactcacttcagagaacaaaaatgaatccatgttcaaaaaaaaaagatggaagtacagtgtgtgcagggaagcaaggcagaatccaaggggaaatgatggactatgggaggtatgagggcgaatccaagggaaattgatggagtatgggaggcgtaagggcgaatccaaggggaactgatggagtataggaggcatgaagatgaatccaaggggaactgatggagtatgggaagggcatgaaggcgaatccaaggggaactgatggagtatgggaggcgtgaaggcgaatccaaggggaactgatggagtatgggaggcgtgaaggcgaatccaaggggaactgatggagtatgggaggagtaagggcgaatccaaggggaacttatggagtatggggaggcgtgaaggtgaatccaagggaaactgatggagtataggaggcatgaagatgaatccaaggggaactgatggagtataggaggcgtgaggttgaatccaaggggaactgatggagtatggggaggcgtgaaggcgaatccaggggaactgatggagtatgggaggcgtgaaggcgaatccaagaggggaactgatggagtatgggagtataggaggcgtgaggttgaatccaaggggaactgatggagtatgggaggcgtgagggcatgggggcttgtgtaaaggaaggaagagagaaaggaaaaagataacctgaaagcatcacttcttcatgtggcaagcttgcatctcctgtaaaaggagacagtttaacagtttaaagttattattttcatagcactcaattataaggtaaaaggaccaataatcctggtgacttatgacagtaggtgatctagttcctaggttagtcacactgctgatttgaagcactttcccaaatacagcaacatattactgatcaaaatgcttgcaggtggtgtttctgaagtctgaggctgttgcaaccaaatgtactcctccaaggagtgactggagcctccaagaatctattgggtatttgctaacagcaaaataattgataaaaccataggttattagtgagacttagtatgtattgacagccccaaatccagaagacggtgagagttgtgtgaaaaataatacaattaaccttttcttatattatgacattgcattttatcactattatcagtattaatgcaataacatgacaatgaactttgagcttctaagtttcaggtcctctcacatgactgaatctttagattgggagcatatgctaccatacgtgttagttgttttagtgtttggtagctttgaatagtagagatgatgagaaaaagttaggcaaaggagaattaatgcttgaaagaattcaaagggctagacaggggctgtaggtgtatgaggaagcaaactagaacactaaaagaatgagggaactgccctccctggggagcagaaaggggatgggacagggctcaaggggggcaggggaggaggggagggagagggaactgagattgacatgtaaaagaagcttgtttctaatttaaattttaaaaaaaaaaagaatgatggggctggaagaaagaattctttcctaagcaattgggaggacttaactcaatttcctgattgtctgttctcatactcagttatttgtacccaacactcattctttgggtagtataggacctccttgaactccagagtggtcatggggggtattgtgtcccttgagccacgccagcttatagtgctttacattaagacagcaaatgctgtggttgagagaacctgggtctgaagagtcctggtctaacctcccaaattattgatgaggaacaagtaatcttgataagtcttcatcttcttctaagtgagaaactgggtgaagctaacaatatgcatctccagaaatgtctttgttttgagataatctatctatgtgaagtgtaggctttaagtgtgtttttttaaataagaaaaaaaaatgatgtgcgtaagtagaaggatgtcaatgataaatggcaaccagaaattaaatggctgggatatatacaagtaaatatgcatagagggggactggagagatggctcagaaattcagagcactggtttctcttgcaaaggacctaggttcagtttccagcacccaagtgatgactcacagtcaactgtaattccagttccaggggatccaaagtccttttctgtaataagccagtgcagcaatgcacacatatggtacacatacatacatgcagataaaacatacataaaacatttgaatgcaaacaaaagacactctagactccagagtccaaaggagtgtcttacatactggaatgtagtatggaaggaaacctttatgtagaagtcttgcttcccaagcttttaatttatactgctgtcaaaattacaaaggaatggtggctggagagatggttcagcatttgtatgctgtaagtgcccatgaatgcaatgcaagtttattacctgagttcagtcactggagcccaagtggaaggatagtactggattccacaaagttgtcctctggccacatgcacaactgtactcagatatcataaaagagaaagaaatccaaaagccaaagtttattatatagtatatacatgtattgaaacaagacacaagatcctaaaactatggacaattttatgtcaattaaattttatctcaatttggcaaatttatcattcttataatttgtattactaagagtagcttatttggccaatggcatcatactgttaagaactatattatcatagtctattgaatgagtggtgtttttagtttaaatattgcatagtttggttatgactgataaatatgacattttataagtagaagttagttagtagaaggtgttgtctactgaaccctcttcctaaaatttaaacatgcaatgttcagaaatccttccctttttatgataggatgcctcctgatggcaggactctcctttctattgttcttctataatgaatggtttctcttttttccctcatgcatggggagggagttggctttgaagaagacagggaggagtattatattcccaagaaaagccagaggttttacagactcagagtagttgactcaaaaccaatctgggatactgtagaagggaattatttaaacagagctaagaaggtggatttgaggaacttctggaattagagatacattcaacttgtataagtcaatctccccaaatcaaaaacaaaacaaaacaaaaacaaaaccaaccctgaaatctgaaacactttggattccaaacattttggatgagtcataccctgtcctgtcagattgtgtgtctacatgtccaacttaacatcttggaacctgtgaaaacaaagtgggctgcagtaggccagacttggggatgggactgtgggtaaattcagtcttgagattcattaattttgttcacttctgcccatagctcatgtttgaagcagagccatacctctgaaattctagactgttacctgactgaagttttgtgtcctgagacctcagctccaatgacttgtaaattacagcacttgtgttttttgttggttctgactgccaatgctgtgcccatcttcttggatattttacaaaccacaccatcagaagataaggaatcaataccttttttgttgttatgaatgttcttgaaatcatgcagcacattatatatgccaaccaggcagctatggacaacacgccttcttgtatttggtgacttttcaaaggaaaacatgtctctctctctctctctctctctctctctctctctctccctccctttctggaggtattggcaatatcagtctcacacaacgtttatttatccctactgatttgctcatcacccccccccccagcctgttgcccaaactcattgacccaccccactgcgtcctttttaggagacagggtggacttccttctctccatctccagcactaactcaccaacttcctcacagtgtaaatgagcttttcctccgtgctcacccagctcttgttggggtgcccagtggtgtcgtttgcagcttattgaaaacggaaaatcatatcgtcaggggggcgggctgcgggcctggaagggggaaaatacactccatggctgggaattttcttcagcatgagagcttctcaaacacttgagagagaactagggatttcccccctgtgttccccccaccgcagcacccaggctgaggctgagtccagagtcgcctggagagtaggtgcaggtctggagggtttgcctcttcagccactgggaggcctctgcactccgttccccggcgcctggctgcgattactcactggagcagcggcaccagccttccaccagggagcccagctcccgccctcctcccccatctgcagcctgctggctccctctctccctctctgtttcactcactctctctctctctctttctctccctctcctatcgcagcacaatgaaagcctgtgtttcgccgtgagtccgaggagcgggagccggtgtcaggaaagcgctcggaacagacctgaaagagaaaggaaaatacaagctacttttttcttctttttccccccatctataaagcgaagcaatacaggagatagagccacattgcctatgggagtccagaccctgtgagccactggccggggatggaatgtacaaaagtggacagaaaagtggctggacatgactcggtgcaatttgctggaagtttgtaagtttgaccatcgtttgtaaattactctcggaagactttgtctctcttgatactgtgttagaatagaactgggggtgagggataaaaacgtaagtgggaaaggggaaattgtgttgaaggagccttctcagtagccagccacttcagagagctttcatttaaaactaagaaacctaagagggaatcaggatttttgccggtgattggattagcttgaagaaaagagcatgctcctgaagtccaattacagacgccgttaagacagactgaaaagctgtctcctttggggagaagactacatcctaatataacctccctcccccggagaaaatcgccaacaccggagggagagaaggggacggagaagccaagacagtctcccttgatttcgcacagtttgaacatgacttccgaagcctcgggaagcagccctgttgtttgtgttttaacctgagtaaaagtgaaggttgccggttgcgtagaccagaatagaaatgcgtttctctgcagaaacacccccataaataatttcctgaagcaactaggagaaggggagtctggttctctattaatgactctttccattccttttgctgtacgtgtctgtctcttccttgatgatccctgaattcttgaactatcccccagactttgtgtttacaaagtacctggaggctcttgtcagcctggtgggggagaaaagatctacaactctctcctaacttctcctgagctgtcaaatgcaattagaataagttgatcagggtttgtttccaacttcccctctccaattggtctctaatctttctccccaccctcttgctgcccgcgcccctcccccacaccttctccactgtctccccaccctctgaagacctctattcatgtggccctgaacactgaaaccagctttgcctgcaatactcagccccagcctctctcttgcacctcaccatcccagaggcagtaatcattgtgtccaacaagatgggggacacagcgcccccgcaggcccccgcaggaggtttagggggggctcctggggcggggctccttggagggggctcagtcacccctagagtgcacagtgctattgtggaacgcctgcgggctcgcattgctgtctgccgacagcaccacctgaactgtgaaggacgctatgaacgtggtagggccgagagctcagaccgagaaagggaaagcactatgcagcttctcagcctggtccagcatggccagggggcaaggaaggctagcaaacatgctaaggctgcagccacgactgccaccaccacagtccctccaccgccccctgctgccccttctgtggcctcccaggcaactgccacagccccaccacctccaccagactaccaccatcaccatcagcaacatcgactgaccagtaatgataatggtgggataaaccgagagcagcagccaccagcttctacccctggtgaccagcggacctctgccctgcttgcggtaaggcacctggttttctcctatgattgtggctgttctcctgtggcctctcgcaaaggtggtggttgttttggcctcatgagttggtggttgtcttggcctcatgtggaatgaatggccatgaagatggccaagataccagtctctcaaaggctgttgggtgtgtgtgtgtgtagttgtaaactcttactatcaaagtcactggtgcccattgtcattgtcctacactgaaatgtgttccttaccagttaatagcctggattttccagaggctaggagggtccacagtttgtgaaagaaggacttacagctgagaaacccttgagaacccttctgcttagcatgttaggcccagcaagacatcctttacttgacagtaacttagctcgattgacctgcttacttttccccctccctacttcccctctgaagtgcccttcacctggggttaggagtagtctatgattggcattccataacatagtatccccacagtaaaaaccatggagggagtacctcacagacagactcctgcacaatccagtctttattctggacccccagaactcatggaaggcacagagagcaccttgtttcagtccctcctgatgacaacacatcaggtccaaaagcctgagtaattttctgactggaagtgcttcctcagaggcacagacaacaccccacccagagggaagagcattgagtcattggctcttggttgtcagtcttggtcaggtgaccactgcttgtggtagttctggcttcccccacactgctatgccattcctctttcagtagaagttagaacccggccctgtaccctgaggcttccccactgggctcctgaagttctgtgactactcatggaacaactacagtaagcttaaaccaaacctgaggagaggcagagacgggaaatggccatgtgagccctgaagcccccagaaagccctcaagaaagatggtactaaggagctcctgatggaggaggtagactgttccagtctgggctacttcttcttgatgctctttcccaggtccttcatctgcagtgatccccatgattcctggggaactctggggactgagacacttctcttccccacaaggcacacattttccttgggttgcccagagctgtgattctgggatccccaggtccagatgaaaactaagcacctataattaactggcctgtgctatatccttgaatgaaactatccagtttctattgaagtttccaggcctatattcctctctctctcccctgctccatccacacttctccctggaattcccagggaaaggaagtttgtctcctgaaagagagatgctgtggagaaggatgagggagagaagaatgaggtttgtgtgcctgtgcgtgtcaccagcatctgcagccaaaagtaactaaatgccttgattgtccccagtaaatttataatctgtctgcaagcctcccaataatgtggctttgtgtgctcagagtctccttgtgagtgcttctgggggtgatactgacagtgaggcatccaggccaaccccagaggggaatgctctgccctgggtgccaagcctagcttaacccacagggtgggcttgtcctctggctctccctcccagcctcagcaaggaaggtagcatgtccctgtggctctctttggtttttgcttctgtccagttgggagggaagtttatgaggttttcttttgctggtgtgttataggagacaaaatgaaaccaacttcaatggtcttgtaactttaaggggcactgcttctgatatggggaagacaggcaatggtgcctggcttggctctactaaatggcagcttcaaaagctgacagtgttttctctgccacccctttcttggggactctcttttctctcttccacccaccaactacctcctaaaatagccccttgctggaacaccccctgagtgtagagatgaagcctgggtttttggtgtgagttaggagacaaaggcagcagcttggtccacacactcattcttctacgagagtggctggtctgatgccctgttacttactgggaattccctgttttagcttctaaatttgatgctttgttcctctgaatgttattcggtctgtgaagcaacttctgtaccatgctattatcactggatggggagagggaggcctgggcattcaggagtctcatctcaaggtctcacttctctcgggcatcttgtgttcagagacaatgttaacaattttaagggcctcctctgctgagaattcatgtcaaaattcttcctcaattttgttgtgtttctatgtccataggcagatttatgtagtctggatgtgttgaatgtaacactttactgttaatttgtatgctgtaagtgcccatgaatgccctttggagaaagggaaggtattgattatctaaaatcaaatatgcgctgtgtaccctggtgaagttctgtagccagcatgtgttgtgtggcagtgccttgggcattgtcagtactacttgccagatgaaggtgaaaggacaacttatgttggtaggataatgttgtgtgggaggtgacttctatggcagagaatatatactgtctggtctctttaatagcttgagtttgaagaacaatgtaagaataacctctaagtcagttctaattctgtccacgtgagagcctaattctgctgtccttactcagccagtttctcatttagctccagttcaggggaagccccacttctgtagagactgcaaacacagagccttgtagaaggctgagattgtagggttcggaggagactggcctttttagccactcagtgaagactttagccactaaatcactttctgctgaagtatgtttgcatcttcgaatgagctgtaaaaactcaataaccactgttccatggagcagttaggttggcacatctgtggaaattatttatcgtttcctcttgtctgaaacacactctcttcctgtgccacagaccttgtcgcttgtttaggtagataagtggtaccaagccatcttccgcttcagacattttctcttctctaatgtgctgcggaggaaagaacacaaatgagatgaggagcttgttttgtggtttggtgactgttcaatcaccaacctgctggatgaccagaacaagtcacttagcactcatctgtcaaacagagatcagctgtccatgaaagcactttcattagtgagtgtttggggaaaaggaaaagaagccagaagctccgccaatgctgctactgagctcctagcaccaaggatgaatactggctcctcttgcgtcagagagatccactcagctttcgcttgtcttttttaagtggtaaaatagcttttattgtaaacagagggattggtcttgcaaaatcagggttgtcaagataaaaccaaaatagctgtatatttaagtagctccaaagtcctagagaacactcctcaaagtgagccgtgctttgaagccttgtgtgtccttcaagcatgccctttatatctctgcatgggccctagaagccttggcaaggtgtgtccctagagtgtctatagggtattagaaaagttatttacacaaatgataggggaagttaaatattttgccaacagtattctaaaatgccagttcttagtttaagaaagtcaaaccagttaaaggatctctgaagttcccaggtgttttataagtttctaattgaccaattcagaatttcagggctgtacagggagggagtggagggcaagtctggaagactgagtatagatgtctacatgacagatctcccctctgggactgtgagaggagtattcacattatttatttatgcagcaatcatttccttaagaacagacctattttgttttgcttctcctgaacaaagtaataagggagagttcttagctatccaggtcctttctacctcattcaagtaaatgcaaggcaaaaggttccagtggagagtgtctggcacatggtgctatttcagacattgtcagagagcttgctctggtgacaaggtgaggtcatgcacatacagatactctgtgttttctttgaaataatgttgttactaagtactactcatcaatatttttctgtcctaaactttaatgtctatggcttccctatagctctactcatatttaatcactatggtattaaccaggggctttcaaacgttcttagacacagcaattaaaatatcatcagtggtatgacaacgattagctgttctcttaattttattgttcactttgattcttagcattgttatttcatttaaaaaaaatcctagtagtaaatttgaaaattaagaagcagccacccacttttgctatacatgtagaccaagcctctctgagtggcttctactgactcctcctcctgtatgccagccccttgcctgtgttcaacatctgcagacaaggccatccatgtttaatgaaaacaactctaaattcctcctccttcattttcatgctaatttccttcacactccagcaagctctgtgggagaataaaggagttgtgatatgctacagacatagcccatgctgcccacagtccaatggagaaatcaccccctgcacagtcaaacagcagtagaagttcctagctctcaggatggcctaaaactgatacagaaacttaaagacctaaagaacgcagggagctccctttacatgttttacataacacctaccaaatccaggcaggatgggtgatgttgtcctgtgttagaaacaaagacactaatactaagatgggcatgatgattcatgcttgcagttacaggactcagaggctaaggtaggaggatcaccatgatccatgagtttgaagccagcctgaactacctaagttcatatttagcctgagctacaatgtgaaactctatctcaaaagaccaagaaaaaacaggccagacagaagcagaggcaggcagatctctgtgagttcaaggccagtttggtttacacacagcattccaggccagtaaattagtgttaaacaaaatagcatggtgccaaacacaaaaagtaatgaaatatgaatattgttagtaagaaagagattcagatctaggccagggaaaatcttataaagaatatggatcacctcagggcctgagaggggtgagggtgagatgggggtgtggacttcaggcatatacaagcagccatagaagttaaatatttaggggccagagcaaagagtagtgtgcttgggtatgtagtgaggggaaaatgggtttgggagcatcctgaaaatgctggcattctcacaagagcaaatcagaagccctggtcaaatatggagccagggagaagcagaggagttcagagctatgaagcaatactaatccttcatgtgcttgaagacaagtagtgccttttcctccagcagcctcctctcagggcatgcagcctaagtgctctgttctttgagcttcaggtccccgaggctgcttaatgctgtgctgtttacacacatctcaattcgtggtgagttatatacagcatgacatggcctttggcgctgagagaagaagtctttaaaagcacacagggtagatgaggaagagaaaccaaaaggaatagagctgcagctcctcccctttccagacctttctgggtctccagttacaagcaaggtctgtcctgctggtgtaatgagctctcttgatgagcaggtggattcctccagaaactgagttgctttgcaccctggtttggaaatgtcttgtcctttaaaagaagcacaagcaagactttataggacactctggttatggataatatttgaaatttgctgattttcggttgataaccaactgaccttttatgcaccttacagttcaacagaaaccagtgacctccagtagtccttacctctctgcttgacagcagaaggctgtgctttgtgagctactcacaactaatggtcagtcctactaccatctttgatatccgtgcctgtctgtaacaggcatatatgaaacaaccatggctgtaagggctgaggaagcacaatcggtcaagatactgaaaaagctgctatgaaaatgagccagcctaagtaattcacacacaccacacttcatggttcttcatggtttttgagccaagatttagaagtcatacatcaaaatgtgggcctgggtggtttttagaatttgggggaatgattcactgttctgtgatccgcacattgctggcttacataaatgatcaatatgggaccatctttttccccttagaattattagaggtgtatggatggaaatcaaatgttgaagttggattcctgagggaggtaaggtagcagagcagttaaaatgagtctgggatctggggtaagtcaccaatcaaccatgtcatatctggtgaagtcagctaaattcccctgcctccatttccttagaatagatgatggtagatctaacttcttaagagttcttcactaaatcagtcaaattcctggtaccatatagaggctcattaaactatagttgttattacttatgtgagaaacaacatgcttgaacaacctagcccaagtttccatatccagaagtacaccagacattcactgcaaagcattgcttttctcatcaatatttactgagggtcctgtgttacctagcttccctccatggtttagtttattatcatctgggatccgttaacatattagtaaagagtccttgttgagtcgttgagaacaaaaccaagcaatacatttcctattcttgggagactcaacaaacccaatctagaacttgactggggtacttcttgactgtatcatccttctagaatacatcacaagtccccattctgcctgtagagtgtgtggttagtgagtaaatgagttatttaaattatctatggagatgttgaatcctttgaagggacaatcttcaacttaacaatttaactaaatttttaattcaaattagcaaacagttctaaaaataaacccagtcccagatttaaaaaaaattagaaggcccttgcagtggagaatttatgcttctggaagtagactcttgtcaaggaattcattagctcagtgtgtgagtgaaaagcaacagaaacctgcccccttcccaaccataagcagcccacgtttacagtccctcgtccccatgtacttcttggctgtgaatcatttctttgctcagtacttcctaagatgtacctttctgtaagaaacatgaaaaagatgttgccaagacttcaaagcaagcgtaatgacggcagttcttaggggaagcaggatgtgcttagagagaaatggcaacaaagaatgttctctgctcttcggtggatggtacttgtggaaggatgatttgcttatttgttcatttatttatttgaaattttttattcttctctcatacattatatcctgacttcaggctctgtgtttctcccttcagtttctgtgagcctctatgagccctactgagttgattctgtgtaccatgtgctcatgttcttgtggtatcttcgacattggttctaactcaaagaatatagtcacaattgtgtttcttgatttgtttgctcctgacatttaagctgagatcctccctttcaaagatagtgattcttacaaaatgtaacatcaaactcacctgagtttacttggttttattcttatttttagtggggtacttttctccctgagtcattctggcaggttcctatgggatatagaaccattaagattgttgctttcaatctcttctgccagaaacatggctgagttacattattggatcttacccagcacattaatagcttacacccatgtaaagccctatgctttgaagtccttgtccttcaataatatttttcaagaactcctgatggatttgagcagaaagctcattacctatcttaagaaaaaagccaaggctggggagataggtagctcagttggtaaagtgctcagggcacatgaagacctggcttcaatccccaggactcaaatgaaaagctgattgggtagcttacacttgtagttctcatgatgaggaggtagagacaggaggatcccgaggactcactgaccagctggctaaccagcctctggctcactcgatgagctctattgagaaaccaagtagatggcttttaaggaactacaccagaggctgatgacctcacacacatatacataacttcacatgctcatgagcaccttcacaaacacacacccatctattctcacatgaagttaaagcaaaggttttctaacagataccaggacacagtgtaatatcccaaagtcatgtcagccaagtagggtacaaggaagtagggcttccctgggtcagtatacattgaatgggttttggggatgatgattgctatatttcggtttaacttgttcctttctgaggatctctggcatccaaatcatataacaattaaagcattctctggataagcagctgagagatcaaatttgtgattaaggccatggttcacctaagtgctaaaccagctatgctttgccatctgattgccacatagcaccgtgtaactctgacacaggaaggcatgtctgctggtattattcattcagatgtcttatggtagcatggagaaagcacagaatgtagatttgagcagaagccctcctgaatgaaacaacagaagtgacagtttagtaaagtttgtgtccaaatcccaagcattgtaccaaagagtgctgcctttgctggcttagattctttgcatgtggatctgtttgcaagctcagtcccccagagagaaagtctgagctgtctttgtactaaattaaacattggttttctccttgggaacctgatcttccataggccaggcaacaatatctttctgagagagccccagccaaccatttcccgcaggaacacactggctggggagccttttcacttgctgtcttctctgcttatgtgtgtgcggtgcaggggagttgttttgtctaactagatccgaggccctcagagcagactcactctgtaatccctgctataaggttgtcctatgctgcttaacatataataaatgaaaatgtctagaccagcagccagattatgcaggattacatgctcacgggggaaggagtttcttcacccctctcccctaaatcctgtgctcacaacatgcaagggagtgtgtcacaaacagaagctgtctccttccctgcttcatctcagctccatcctgcctgtccccctagagggctagttcatgtcactctaaaaataggccactattctacaatttatagacctgtatgagcctgcagagagaaaacagaccaaactctcttttcatagatgaggaaattaaagcttgttaaaatacaaacagataaacaacaacattagctaggggaagtgccaagggatttttcacatctgttccaggatatacaaagtgtcatttatcaggattactttataaacctatgagaaaggtaagtgtagatcattcacataacattgaaattgtgctgcaggatgcgcatgggtattggaatctttctttaggatagtttttaaatgatcatgcaatctcttcaatgtcacatagccctttcaagtggtgtgttcccactcatacagacaatggctgctatttcctcttttaaatattatatggcctcttgacttgctttaaccaattatatgtacaaaaataacatcatgctacacctgaggatgtccttgaggtagtccacttggatcccagacccaaaaagctgggcctgcctggaggtttaatatccacattcggagaaaccaaaacacccttcctgcaaagggaccactgtcctcatgtaagcaactcctcccccatctcagtataatctgctagaaaaccactctacacagcagccctgcagagccctgaggaattctgcctggttgtactgagtcattaagtttggggtggcttataaggtcacataggttgactgatcagtgctagaaaccaataaagggcaatagttgctggctttagccatgtttctgaagattcattgctttaagataatactgtctctctctctctccctccctctccaaaagttatggggttatactagacaatacttgaggaaactgaggtgtaatacactgtgttcaagctcttggcacagactaacagacactaatttccttgctttgtacttactttctcttttagcccccttcctttaacaactcactttcctttcatgtgcacccaaattctcccaggcttccccagctgactgttccttggaacatgatttttttccccctacttctagatgatgggttcttattcctcctaactaccagatttccagcattcttgttccactccaggggtcacatctgccttcagtagtctactcttaaaatagaaaagggttaacctcataaagatgtcactccccttgtactgttatgttgcccttgggagactcagacagcatagcaagtatatatggccagcgtaattgcattcgatccttgaggtcacagaagactttgtgagctgggacgaaatacagggaagaaacagattccatctttaaaaacattctttcaaattctcactcgcttttctgtagaaaatgaccctaccctgcatgtctcgttttggttcttatcttaccttcacaatacatgaataaacaaatgaaagaatagttgggatatcatattagacttccatgctgtgattattatgaaatatcaggaatctagcctaggaagcaggcctgaggtcctgggataccagctaacagtgcaacttaagtccttcattacattggtattaactttcttcctcttctttttcgattattgttattttttcttataattgtcattttaaaacaagaacctgttgaatggcttgggttaccactgaggcctgttttggtatgatacaattttgaatatttcccatatatgtggcttttatttcttagactttagtatctccttaaataaatctattaaacaatcaacaaagcattaataaatatggatatgatttgctttttttaaaatatattggaaaagaaaatccaaagtaaccttagccacaagttacagccatgttggaaggggcagagggcaacagtattcatttatcagtacctgcaggcaggggtagacagactaaaaaccacggttgtgggaatagggctttgtttaatttgcttgtagctggagccctgattcctccattccacacctaccaactacacttgcagcatttctgtggagtaagaaatgttcccaaattgagtaccatcactaaatgatagcaggcaacaaagaatataaaacaaaaagtaattccttctcaggagttgacgagtgttcaactgctcacatcagtcccccatctgtttgtctctcccgcatagacacataacaattgaaaagtgcagattgatggatgggattttatccttgtcaccacttcatctttaaaatatgtttcctctttaaaggggaactataaaggagagtcacagagaaattggttgggggatgggatttagctgactgctatttttttttccttatcactaaaaccctaagcagggcataatcacccatttccctagggcagccctaagccctgagaattcggctccgtttggggatttaatttctttggaaagaagaaataagcaggatcggctccaatgcaccaacaaaggaaacatttccccaaaatattaaatggagaagacctcatcacacccagaagcagctagagcacagtctcttccgcatctctctgactttcagaatcttgggggtctttgaatcatgtctgatcctccgggacagctgggtgcatttcttgacaaagcaatgtgtaactggaatgaatggagaagcatcctttgattgtggttgtcatactgctcattgaagggcttcattgtctgtcaggttgcagtcacagggatatcaacttttttcccagttgcttctaaatagcctggaatttcttttattatgatttgtaggtgaaaatatcttggtattatgctgtgcaggtgacttttctttcttgaatcctgaagtaatggatattaagttgcctttcttctccaatagtttctgttctacatttgctgagaaaatgtacccctagtctatctgtctgtctatctgtctgtctgtctgtgtgtgtgtctctctctctcatgtgcgtgcatgcactcccgcatgcgcatgcacacacacacagaaacactgtgtggttagaatgactttttaatatatggacacaagttggctatgtgagtgattttcagagaaaactagaaacaaagaaatgagtccaagagtatttaaaagaaattgatgcaaaagccaaatgcatactggtttatagaaactaggaaaagataatgttatactaaatagagtgaaagaaattctcttggctggttcctccaaccaggcctccaccatcatggttctcttgggccagtcacccatgtccccatctgcaacccagttgaatctggctccttagtactctgcctggctgagttattgttgtcatagaaaagtcagctccagtgtcactttctaggtagacctcaatggttgtctgaaaagatcagacatatggctgatctctcctcaactccagcatcctttatcctcttacagagtttaattctccttacaacttttaccaaggaatttattttattactatctgaattcctagtttctttgtgtgtctcttctctttccccagtggagctataaactccatgagaccagaggtcatgacagtcttgtttacaataagcatcccaggcccttaattcctggagctatacagtaacctctatagttatcatatgtggctatcagagatggaagaataagaagaggaggaggagagattatccaaggtcacacatacttagtaatgaattaatgaatttaacataactgtacctaggacacacacacacacacacacacacacacacacacacagagagagagagagagagagagagagagaataagaacaatgatgcagttaaaagcaggatgccactgaaaaattcagagggtagataatatcttaaatgttttgccatgttcaaattctaatcttgtctcttatgagaggatagctttggtgtaggtaaaagggtaaatccacagatgttggatacttaccatgtgttgggccctcagaccaatcatctcattggacagagcttacattttaatgggaagacaggaagtcatctattgaaggaacatggcaaacctaatgttgcaacatacagcaccttattccttagttgaatgaagtagctgtctgaagacagatttgggttaattaaaggaaagcaaatctgaaaaacattctaaaaagtgagagccacaagaaaaacgtaagtcctcacagttgaaggactcctttggcacagaagctcagctctggtggtgtgttctccatcagtcttcctgtcccagcctatgtgctactttcacctgtgtgaatggatgctggtcttgatgttttggtgctttaaaactattgcaggcctttaattggaagtcactgatggtcaagaactgaagagaaaatgctgatggtttctttaatggagaataccattctgctttagacttcgaaatcttgggtggggtgttgctcactattagagtcactgaccaatgctaaggagatggggtttgatcttcagcattgaaaaagaaaaggaaggaagggtaggagtgaggaatagatggaggaagggagggaaggaaggagggagggagggaggagggaagggaggaaggcaagaaggaaggaatgaaggaaagaaggagtaaaaagaagggaagaaaaagcaatagaattggaaaagcaatggttgggaaattagtaccaggaccacagggggacagtgtcatagccagttgtcaggaagtgtgcagaagtgatggagaaagtccttctgtatatatatttctcttattggttgatgaataaaacactgtttggccaatagaggcaggaagataaggtgggactaggagaattctgggaaaggtaggcagggagagacggcgaggcgacaccatgtagagactggaatatagtatgcacccaacattctctgttaagataaggccatgtaaaaacacatggattaatagttatggataaataattaagacagagctagtcaataagaagccctatccatgggccaacagtttagtaattaatatagcatctctgtgtgcccatttgggactgaagcagtggctttttttccagcattggctggaaagaaaactccagcaacacagaagcactggatgtgatcataatagtacctaatgtgcataccatccaccttttcctcacagagaccccatgctatcagtaaactgtcaacatagctatctgtacattacaaatcagaaacatacttggagaagctaagaaaaaatactgttgtttaaatatcatctgtgctgcatattgactgcaggtccacacatcatttccacatattctctgtggaattgattttaagtgggaagggcttagacctgtttgctctaagtgcctgccaacctgttgtgccatgcagggcacactggcagcaaccttgagcagttcagttgcaaatccttaactgcattcacagctatattgggatattgaaggtctctggctctcacaagctcacccacacagaacttgaagccaatgactcttctagaaagaatgacaatcatgaatggaatgaggatgttggactctcagccacaccaaatcaagaataaaggatgctaaaagcgagggtcttcttcttcttcttcttcttcttcttcttcttcttcttcttcttcttcttcttcttcttctcctcctctcctcctcctcctccccctcttcctcctcctccttctttcaatcactaatttgtaagaaaacgaggcaaggtgagaatatggtttaatttttgaaataattccaaagagtccattggcaggttgtggataaggggtacacagtcattttgaagcagaaatcaagggaaattcttcacgggaaccgaaactggtcttttccattttcttctgtgatgtggctctttttttgaataaagatcttagatgggacttacaagaaagaataatagttcttgctcaggggtgacttttgtaagcattttagatccaagtggaaaatacattcctctaagttgatgtttttttttaatttttttatttgtttgccaaaagaaaatgggagtggtgctcatataatcaatgagatttttgatggaggtagagggatgttttatttatctctgattcaggttccactgtagtgtcagacttctagcaaacatatatcagtaaatgttgaactatactggcaaatatacaaacacaaacttttttgtgtgtgcaactccatgcatgtatgagtgtgcatatgtgttgaggctggaggaccccttagttgtggttcctcagctatcattcaccttctttttttatttgttttttttttttgtggatttgcagttttgaaacagggtctttcactatcctgggactcatcaagtatgctaggctacctagccagggagccgtagatcctcctgtttctacctctgcagtaatggaattccaaatacttatcatctaccctagctttttatacatggattctggggactaacctcaggcctttgtgtctgattaaaccatctcaccagcatgagtttgtttgtttagtttggggttttttgtttgcttgagttttcaagttcccctgtattgaatgcagggttctatactgtggcttagaagcatgttcaaagtgaatatgttctatggtttttgtcagattcccaaagtgctccaagggccaaagaactggaagtcaaggcttggggtaggagaaagaagaactggaggaatcctggagtagggttatcactccctccacagggcagcaagctccaggagagctgtggagttggttctctgtctgtgttctgctcgttccagtttcaggaatctgtgcaaaaatcaaaagcaaagaaagcctaattctgggccttctttgttgtgttatctatctgggcaccttttctatgctttctaaaaacctgcagttcctgggtcctctcttgttttcattgttttctgcagttagagccctaggcaggcctttcttaggcttgctttctaagtgacttctcacatttgtaggcttcctgccctctcatcttcacccctgcatttaaatggtgtctttccctgtcttcctggggaccttcttagtgaacatgctaaggctggcttgcagcttttcccgcacctcggcacacggactgttcttattagctgtacaccccaggctgctggagttcctatcttggcagtggaccatcaaacaccctattttttaagagtctctaacttagttgtaaacacgtgctgtgactgggctctctgtctctttgctcgtatttaccaagtgggttagctgttgaaaagttgttatgatgaaaaaattaaaaaataaaagttcagtctccaggattgttattttccatttgtctaactcaaaaccgtatgacttcacaaagaggaaagaaagaaagaaagaaagaaagaaagaaagaaagaaagaaagaaagaagaaaaaagcaattggcatttagtttcttcatttgatggtctagtcatattggtaatttgagggggaagaatggacccgctggatcattttactctgacaaatgccaatcaaacatgcatgtggagggggtagtatttgctgcacatgtttaaatgattggaactgctcaaagaagtcaatctagtttgttgtgtaaactgtttatgctcttaaaatcatgtgtatttataataaaaacattctatagatgtatttaagtttttaagacttttcatgtcccattaggaggacttaatctctaccccaaattttctgcatttgcttacacatccattcatggactgttatctctgaggacctcacacaatatcaggatttttgtgaagaaaagatatctatttctttgatccctttaaggaatgtagggtaacaaaacacatcttaatcttttgaggagactgtaacccatggcttagagtaggagattcaggaacttaaatgttaagagatcagactctgactttttcctcttgtgatttaagtaagattctgggagcaatgctgggtgaattcctcctcatcacaggaggaacactggttttcctcagggttagcatttcaccaaaggtggagcatcagaggaggacatctaccctcagagaggttgtcacacctgtaagaggagtgtgtgtgtgtttggggaagggggtggttacgaataggccttgccctatgggctgccactcacttaataggtaggttggcctggaagctctcaagctgggtgacaagtgaatctcttcatcttggatcactttgggaggcttctggcttcagtgttgattttgcccctccagtaaaataatgttttcctccttccatcacaggcagaggagtacaaacacaggccagcacatggttcccacatactttctttcccagatggctgtgctttgaacatgtttgctttacagtctttgtcatgtaatgtgtggtcttattgtcatgcttcctggtctagcttttaaatctctctccttatcaaatgctttcactacccatgctggatagttggttttccattataagaaacccagaaatgtgggactgaagagaagactgagagggtgaaatacttatcatataatcatgataaccgaaatttggaatttctagaacccaggtaaagtcagatgcagtgtttcacatctgtaaccccagtgtccccatggcaagataggagggagagacaggaagagtccttgcaagtttctgggccagctcacaccatacttacaggaccatgtacaatctctctctctttctctccctctctctctctctctctctctctctctctctctctcctttcctctccctatccctccatcttcacctgtctctcttctaattaaagtattaatgaattgaagaccgtcacagaaggtaggtaagaaaaggggagaaacacaactaagccccaaatgtgaatggcccattctgccctaagttacatctgctcctgggggagatggggtgttctatatgtgtctttcctagaaacaacagcatgcttcttcctggagccgtcatgagtttgacatcacaagagtgctagaaccccactagaagtatactcttgggggtgttgaacaaagttagtgtgggactgacatagcgtgtacaaatgttctttctctcggccttctagtgtgccaccccactgttgactggaatcatgagctatacaatggaacgttaaatggcaggaggcataagccagtcaataaagcaaggagctcatgccacttcattctatttcctcctttgttaaggtgcaagtattttatttatttgtttgtttatgttttggtttttcgagacagggtttctctgtgtaacagtcctggccattctggaactcgccttatagaccaggctggccgcaaactcacagagatctgcctgactctgcctctcgagtgttgggatcaaaggtgtgtgccacccaccacctggcttattttaaaaaatattttattaattctttgcaaatttaatacaataattatgatcatgttttccccaataaactcctcctgaatgtagttaagctagtcagcattctagcttgaagtggaaaggtgctcatgagccccactctaattgaggagctatggacagatgatagcttctagagggtggagaggctgttttcttttagggtgtagcttttagtaggttgaccattctccagtgggtggccccatattcccaggagtacatgaagagcacaaattagaatcagtaggcaattaaacaaaaataaaaagaggacatagagtagtttatagatataacctaacccataaaacacctatgtatccatgcagtcttaatctatctctcatctcattgccagtcgtgagaatgtagctgcaacttcttcaggaacaggtagcatttcccactaagcaatgctccttgcatggtggctgcttcttgttgccgttgttggtttttgttgttcttcttttatcgtcatcatcaccattattattcctcctccttccgctcctttttcagtatccattttgttattttaccaaatttcaacatctcaagtgattccttctgatagctagacttctgtgtacagaatctgtcttgctcacaggctttatggcaattatatcaacacaaacattatctagttatttgggggggttatggtatttccttcactatagaacttgagttctaaacacttaaaggagagtcagaattaattgtgaccagggagatttttttcctgaaagggtggcagggcacaattccacacatgtgtgttgtcacatctttgcaaagaaatagattcttctgtggtaggttgtaaaaatatgtctgatgttttaaaagcttttagggggaagaacttaaaaagttgagctcttaaaattctctgacagcaagatttgttgttgttattcaaaagtcagattccagttgacatatcaacaggatttgttaactgtgttagttatctattgccacatagcacacatttattgtcctgcacaatttctgcagctcaggaactggggaactgctttgttgggttgggctagcccaggctagatcatgggatttcagcccagccattggctaggattctagtcacctcaaagcttgactgaggatggaaaatctgattccaagttctcacgcacagttgttggcaggagagctgcttctcagggaatgctggcctcccttccagcattgacctctgtgtaggctgctgagtcctaaagtcccagtgtcaggctgctctcctcagagttgttgattcaagagggacaaccccaaagggaagctgttgtgcttatccaactccttcagaagtggcagacatcttctgcatatacattggtcacatagactaaaacctgtatatttcacaagaacatgaatcctagaaaacaggacacttgggggccatcttggaagttatttaaccattgatgaacaaacactggcgaaaaatctaggttatattatattatattatattatactattgaagacaggtttgtccctgacttgcatagtttgaccatttcttccttttgtagatgagtctcgtcacctctgtactaagcactttctaaatacttaggttagatcacagcataaaacaaatactttccccacagtgagtcttacatgattttatattctgcttttcatgtaacaagccccacaggtgggtgggcctatgccactaaaataagtaagtggaccttaaaccattgttttagatttgacttgtccttgaccctcttaaacaggaaacagtggttgccactttatctactagaataggatagatttcttcttcctgttttttgttttttaagaacatagttgtagtaatataatctctctggtaactgctttcttctgttcgttaattctctcaaatgatagactccctatctctgatggccaaagtgtggaagtaaagaatttcaaagaattaagaaacatgaagcacattactcaagaattgcagtgtagggtttggaccatctggtgtttgagacataattgacttgctaacttttgactctgctgcccagtatgtgttgttgactccactgagcctctgtactgctgtttctaaactgctagcaacaccaacacctgtcttggagtagtgcctagtcacttatctcaggatctggtgtgtacatgcagttgaattctatgtacttttgcattgttctgactcattactaaggctcatcactaatgttgctgtcacaccttacctcctagtgtaacccaagtgccctggatgataacaggcatatataagttcactcccaaagcagcctctcccaattctatcatcagccagagctattattgctttttgtattcatgataaattggaagaacaacttcatctgggattcatgaacccatggtttctgatggatcatcaccagcttagcactgagatacatatgagtgctttgagatctacctgctggcatctcactgaaggagtttgtgctgtgtatgttgcttcaggctccagggcgggctgggagtaggtgtgaaggactctggagaagaaagacacacatacacagtcaggggtgtctctctccttttgtcagttttcacacttgatctggaaagtccatcatttcccacagggcagcactttgccttcctgaggtagagtagctctcatgtctgtactgagtcactttcttctctggaatgacaccactaccacctgagaaaccagcagtgagaatgggaggactttgggaaccaccaacctcagaaacccagcaggcctgattcttggataaggagtgaggtatgacttgaagacacctgatgtctggaagctctgtgtacctcatacacaccctcatttcaccaacctccaaagggcaggaatgtatataccggaaacaccttgggtatgtaaggatgtgaacaaatgtagtgaatttccaggcagcagtgggctctggactggtttaaaaatgatagcatttctaaaaatacaagaagggacggggggtggggggtggggagatgttttagagttggactaacctgacactagttgtctacaggacctggaaggggcagttatttcttgacctatccaagcctaggtgtatatatgatggaaaattgcctgcctgagatatcatgtaaaacatgcaacaatatatttcaaaacaacatcctaggaaactgcccttttatgctctatcaattttctaaattaatcagctcagaatacagaatcgctttaattaggaaaatatctttagttccatggtttatttcattagaatttattgatgaggccactggtaaggaatgtgcttaataatctgagtcccacttgagaaattgggggtcaggaattctggaatgggatcctgataacagatgccttctcatttgaatttggagacacagcttgtggggagactctcagacttgggaggtttggcagtcactttggcttaatcattaggtgtctgtgggatcttttagctttgaaagctctgcattgtcaatgtcataaagccgaagtgctcctaggggatttccccatgctttctgagacaccaaagtgagattagacaaggtgcaagccccattctgtggaaaccgtgtcagtcagctttgtgtgtgacctaaatggaacaatttaccactttcccatgcatcgctttagaatgcatgcagggacagggcacctggggatattcgtggaatgcaggcctgaagctgaaagacaagtaaaaccagagggcttgggcagagaagaataccaaggtactgagcacttaactcccaagagttactggctgtccaccagttgtggaggacttggccctgacaaaagtctcactgccttccataagtttggggccattgtctcagttccatctgtaagatgtggcttgaagtctttgtttggttactatcttgacttttgaggatcccatctcaggttcctgctccacttaccatgttcctcatctccatctccattctagtggctgtgtccatcatctccatctccattctagtagctgtgtccatcatcttcatctccattctagtagctgtgtccatcatctccattctagtggatgtgtccatcatctccattctagtggctgtgtccatcatcttcatctccattctagtgtctgtgtctatcaatcatctccatctccatctccattctagtgccttcctagagtatcactaccagttgccttcttacatggaattgtggtcatcacatctgtgctgagaacccacacagctcctagtgtttcacttagaataaacatgactctttaccaagttaggaaggcctgtgagtattaggctctgtctcctttggagggggggatggggtgctgggatttgaacccagtacccacaatgctaagcacacatactaagcaaacactctctcactgagcctcatccctaggcattttgttatacattttaatttgagacagggtctcactaagtagctcagccttccatgaacttgctttgtatcctaaacaggccttaaattgtgatcctcctgcctcctactccatgggtgatgggacttcagggctacacctctgaacctagctctgcttccctcacacccccattttctcactgtctactggctgctaacctcatgtgggtcttataactttcaagtgagtcaggacctttctttgcatagatccctctactgtgtttttttttttctcccacacagtacacaccacacataccacctggctggctgccacatactgtcagatgtcagcttaaatgaaaggccagccactagacatcccctctatagggtttccctctttctttttcttttctttttttaagcatagcacttactgcaactttcactgtctgtgtctatttaccactaccaccccattttagtggtgtttctttcatcatataaactccaccttgtggtcttcaccttgtgtctgtggtacacccagagttttgaacatgttggttgcttctgaatgactgtacaaataccctggtttgctctactccagaaggaccaacaggaatatacatttctgctttctgagataaattcatctttttatactattcaacagaatattcacagtgcctcacttgtccaaactataattcaagaaacatttgattctttcttttctgaagagttgaaggatcacatgtggcttgagtggcagcaggacttcaggaatgtgtccctgtgataggaaacctgcacagtgaaccttcctgtttcttttggctactttaatggttgaaatccatccactgctccagttggccacagataagaaatgaaatgtgaagttgggttgtatggatctgagaagagtttcccacagcctgccctcctgcctgggtacagaggactagttgtatagccctgctcagacaggtctcagaactaaatgtccatgaggacaggccagattgctgtcttctctactgagccttattgtggacagggagcaggagactgaaccaagctgaccaatgagagtggatgaatgaaggcctcaggaggacaaactaagtgcctcagaatttctgaggccaacaagaccaaaacatcaaagagtgtatgagagggtctatgatttcagtggaaactggatcccaggacataaggactaaatatatttaaagtttgaaggaaataacattaggataaatgcaacaaacacatgagaaatccaatcccaatagataggtagagtgaaaatatgtgtgaaattaattaagtaaaataagaatgtgttttatagggaagcatatcagattgcttagggatttcttgaagataccatttccagcctttgaagttaacaaaaacaaatgtcctcgcacacaccattcccttctccctttttttttcttatcctttgaataaattctactgtgtccacacaccttaccatgggtatcacagcaggtcagaactgaccaaattctctgggaatgaagtctgtctggctcagaacctcttcatcagtacactcctcagaactgagggaagcagcccagacagatgagctttaattagggacctcaatctatagatctcagaagcctccctagtgcctactgtaacatcaaactttacagtcaacaccttgttgctttgattgatttactaattgtggccaagaatgcacttcctcactggctgccatgacacccactagctttgttagtgctctagctggtagtgaagcccacaggggacccagatggaacaaggtcttccctgccaatctcatggcaactgcatctataggcccaatgaagacaaagctgtttctgcatcaaatattttttctggtctgagtgtaaaactagacttctatgcagaaaatggaatggtgtttacacagagcaggaactctggagacctcttggaaagtgtgggaagagttggaataatctacccctggccctaattccctgtgtcagggtatcctagcagtataccctgaagtgaagagaaggaggtgacaatgccactgtgtaaaatgtccattgtacctctcagatacagagctggtcaccaactggcaggaaggatgttgttattgtctgggagtgggtgaggcctgctgaaaaaaatctgtggtatgaggaaatgtaaaacaagtttgtcttgttcttattaggagaggggatattgagccgatttacaaactgccaaaccactactcagagttggaagtattgtccaaaagatcatagtggcacaacctagaaggctgcagatttataaacagcagcttcagtgctcacctggggcacaggctaagaggccacctttgactcttgcctctttttccatctttaaatgtcatcatctggagttagatttaagcaagctctcagcagaactagccttgggaggccttagaagattgcccttgctttagccattttacctgagatgactcccttttctttctttgtttatttaataattaaataagtgatgatataatatgatggtagtgctggagactgaagccagggcctcatgtatactatgcaaggcttctacctctgagatacattctcagccctcccgttctttggtcatcaccctgtcttctcccaaggattcaacaaaatttaaagatggaactatctgggctatggggatgactcaattaataaaaagcctactgtgcatgcctgaagatctgagttcaaccccctcatcggtgcaaaaagcaaaggatggcagtgggcacctaatcccacctccagggaggtggaagccgcagaaccccgagggctcactagccagtcagtctcaccatctggtagctgcaggtttactgagagacctggcctcaaaaacaaggtaaaaaatgaagaagaacctctggctgccacacacaccatacacatatgcaagcatacccccacacaaacacacacacacacacacacacacacacacacacacacacaatgaggattttatgtgaatgaatgagaccttggttgaggaaaggaatgtggagaaatgtgtgcggtagcgggtggagaagtggttgtgttcctggggacttggaattatgggtaatgagctaattactgtccccctctttgctcagggtgaagagctgggatttccatttttagcagtttctcaggtgggtgctgatgctggggccctttggaatttgactagtttgattatgaccgaagctctgtaatttggtagtcaaggatcatgactgtgcagaacagctgtactctagctcattcacacaccacacagacatgatgatgatttgatgggcatgagcctgagctgatgtgcacaaaaatatctagcatagtgctaacttatctaagcactcagtttcttaattacacattattactctcttgatttgtgcctacgtgggaaagtacaaattttaggtgttttcttgaaggagggaggattgcatgtagctgttataatattacacaagctcacaatctagttcctattccaatacagccatgatattgatttctgggtcatggaactatacttaaagatccggaattagtttctgacaaaactctttagtactaatttttgcagcagataaaagacaacatggtcacagataatgatgattgcaattgtatacccttaataccacaaacttgtacatttaaatggtaaactttattttgtctattctatcacaatttttaaaagtagcaggtagaatgaagattagattctgcctcccctttagtggtctcctatagtggccgtcattgtagcaaatagctttgcaactattgttcaaattatcctcttagtttgaaaagggttagaccatgacaacataccttgcatagagcacattctaaatgagtactgtgggctcaacactgcagcacaaatctgttgtgagaatgaatctggtggtgtttcaagttcccagtgctggattagatttcattctcatacacaaaccccaatctttggattctcatccagtgattaaacaagaaatttcccctaagcacttcacctgatgataagtccaagtaagttgggttccacggcttataagtaagccccataaacactgatgcaccttttccttagcaacattgtacatgcaagaccgtgaagccttctgcatgggatttggaaaaatcaacagatgttagatttgccctcagccatgagaatcccagctaggtactgaggtgtctagcaatgttctccagcctttgcttcccctgatgcctgctccatgaagaagattcttcagattgtgcctctagaattggggaaagatcgagcttcaaggtcagaaacaatctgtgagttacaatgaggttacatgggaaactttacattaaaacctcatggttcatacaaaagaattacactgaattatgattttttcctgtagtggcttcttcctttgttcttgtgactctggagcaggctgcaagtagatgtctatgattttttaaaccatatgaatgatgaggcagagtgtaatagtttgctcatttgctcattctaacaatcatggggaagtcacatgctagagaaagcttctttacacaaaggaaatgggctcagaaaggggtggccattaggttcagattgacatgggcagagcaaagggtcaaattgatgggttgtcttgtttccttttgagaacatctctctatgcagcccagaaaggccttgaacccataattctcttgtcttccaagagctaggtttaccatcctgagcctccatacctgaccatccccagaactttctatagcatatgagatggcatgctctaagccacagggcaaccatattgccaacctaacaacaaggaaagaaagccttatgtgcttcttgctttaataatgtgcttactagaaaagctacccaagaatacatgcttggtgaataggattacattgtctcttttccttcaatacggaacatctctaactcacatatggtattgactgtggctgcttgaatgatggttttgggattccatgtgttctggcagtttcaggtcacattgagtgagatttgacatgcactcatcatgtccaaggtaataaagttaaagaaatggggtcaccgtggcactttcttgtgtaaaatcaatctcaaaggttgtattcatatttttatctcttctaagtagctgacttctacattccaatttcttagtaaaactttaatttttgagacaatatgagttggtgctattttcagagtagaatttactttcaaccacaatcacaacataaacctggccactgttgtgaattctgggctctaaatatgacaggaagtactctccatatccatcctcttacacattttggaaacttaaagagtctggcaccatatctatttggaagatagaatatcataatagttaaggacatgagcattacaaactagagtgtcaggctgagaaggtgtgctgagctcctagtacccacatggtggttcacaactgtttttaactttagtttcagagatatagtgccctctctggcctccttagttaccatgtgtacctgtgatacacatccatacgtgcatgcagaacacttatattcataaattaaaaatagataaatctttaagaatccaagccccaccattaactggacaacaaatgatagtatactaagacctgcctaatggcagcattgctgggaagattctgtgagaaggtagagatggtacctagtcatgtcagacatcatcaccatcactacaccttcatcatcttacatgatagatcccaaggtcttaccgggctggatgcagctatttctgcaaatgtcatgcttataggtaagactgaataaatataactgtgagcagaacaatacatggtaaactaaaagcatgcacttactggcgtctttctaccaaaacatccatggggttaaactggggcagtttggagtactggcctgtgagtgtgaatgaattttcaagtactaaaacccagaggccttccagatctcactattacatcagacacaattgaattactcacctcagtgggagtcacttgctccaaaaccccaaaaatagttgtccagaactttctaaactttgtcgggaaatgtcaataaggacacttggttcttttcctttttcactttttaactctgttttgatgaatttagcaaataattttttatttgattttattctgtgacttgccttgtttgcttatgttgtagcatattctaaagattattttttaatttttaaattatatgtatggcacctatgagtgtaggtgcctgtggaaggcagaagagaccactagattacctggagctagagttatagatgattgttagctgcctaacatgactgctgggaaccaaactctggtcttctgtaagagcagtagatactcttaacttgtgggctatctcttctgtttctgttctgggtctttacagttggacagaagcacacagagcagaagcttatggtacatatgtgcttcactgaattgtacacaaatgagaatcattcatccactgagtatttgctcaatatctagtgtgtgtaagaccacacattagttgtggggtctctgacttcaaagattttagattctattaaggaggaggatgtcttacttagggtttctgctcaccacgaccatgcaactcttataaaggaaaccatttaattgaggtggcttacagtttctgaggttcaatccattattatcatggcaggacatggcaacatgcaggcagacatggtgctggagaaggagctcagagttctctattttgatcctcaggtgacaggaagtaaactctttcactaggtgtagcttcagcataagagacctcaaagccacccctatgatgacatactttctccaacaaggccacacctactccaacaaagccatactcttaatagtgccactccttttgggaccattttcttttaaaccaccacagtggaacaaacacaaggaaactggctttaaaaataagccaaaataacacaataccaaatcatccccctacagagactactttctttagattttccctgagtcaaagaagtgggtatttttcatagcaatggtttggaaagtgtcttttgagaccatcaagcatttctaacctatactgttgttcatttttagttcatgtccaaagtaagtttcttattgttaaagtcatggcatagttataatgattgtttatcataattataatgattgtttagggaaatgattagataatagagaatacaatataatctggtacaaagttgagacgttgatatcagaacttataataacaccataattaaagggagcagaggaagcctgagtggatgtgtgctgttggcatgttcatgccatgtcaaggatcctagtctcagacccatggaaaaatagcaaagcttccccaggtgatactcagagaaatgtcaaagccttcctctgctccatgtgcaggtgttgacagtgtgtacatagaatttccaccatagctttcttccccaaggcgttttttggcctgaagactgctcccctacaggactgctcctactgagaatagctaaccctgcctccttgttcatctgtatgtaataactgcctccttgtttatccatatgtaataaccctgcctccttgtttatctgtatgtaataaccctgcctccttgttcagctctatgtaataaccctgccttccagtttatctgtgtataataatcctgcctacttgtttagctgcatgcaataccctctatgccctgttcaactgtacaaaagaaacactgagctttttttgtggggaggggcaggtccacccaaccctagctacttctgtgttgctgtgtatctatgtttgttttttttccatgtccttgcagccccagtcaggtccgagtccctggagtcctacaacaatatgccacacattcacttaaattctctctgggatagatcttgatggctggtttctagacacataaagtcttgaatgacacagcagttgctcatatgtatgtttagaaggctttaattacatttcagaatctagtcaacaactagagtctcatcccctcctggtttaagacactgcagtatcttagtataatgacttccatacttttcattagtattctatactctttattatatccagtaactccccagagttcattaccctcaaataacacaccctcaaagatgaatccagttgttgggtgatcctacatttttctacagcactgtataaattctggaattgcaaagaagaccacgtattccatggtggtgtgtagacttttgccacaattccagagaggaacaataacacttgaaatcacagggactgtggaaaacccccacccatacctacctatgagtcacagtccatttgttcctttgggcttggtagtatcatggtccagaaatcagactttttgtgagagattatcattgtgggggatttgagggagcccagacactttgagaaaaagctgtcacctcacagatgtcgatcaaatctaaaaagggggtgtaaaggaaaaggttccactttaaagagctccctcctagcccatggctgagacactgtcccccagagcagaactgtcattcttgttggagaacacagctggctgaaagcagtttcaactttgcagactcaggcatgtgtgggagctacagctttaagatggcatgccccccccaacccccaggctgtgcagagcccctgggctggatgtgaatgggtgttttgtatgaaggttgtggttgagccagggccacttggtaatcagggcagcaaggcccattaatcctcaaggaatatactttacatacagccctccctcttctttaaagtgcaaatgtaaggaaaactctcctgctttgaccttactttaagttcagcgctaagaacacaggtatcgccagcactgtctcctttaatatatggtaattagcactcttctccaggctggctgcagcagtaccttcagcttctgggaacggggagcaggagtggggatcagagcaattgtttgctgtgttggttggtgactgtgatgttgccatgggaaagctcaggacttcaggggagtttgtgtttttttgggagagttgccaagcttctgtgacttattacagcaccatgagggagcaggagtgcacagaacagtatcctatatagccccaagggcaggatggctctcatcacaggactctagagggaggggtatttgctttatttaggctcagaagttatcaacagatccagcattttggtagtctatggatttggtcttttagttttggaggagaaccaagtcgattccacatgctcacatccactaaaaagcaaaactgtgtgtgctttacatataaaaaactcttgtgaagaatgtcatgctctcagataaccactccacccacaactgctgctgatctccacgcagcctcaagaaaagcacaagttcacagtatcaactgctttagtttgaaaaagttaagttgattgagaagatttcttttaaataaagtctctagactgcttctcctggacctctgctgatacccgatagttggacatttgaaccccagctttaatacaatacctgatctagacagatgtagatttggaagttcaaccatcactgaaagccaagaattttttgtaggagtcatatgaaagcttaatatctagatttgcataaaagaaaattctggagcttggtgaaagctatgttgccttttcagataataaagctcccctgtcagaggtagttcactcagcacttcaggtctagaccgggtctccactgttctgtgccctgtagacaatgcctacacactctcaggcaatgtcttcattgtgttctgtactatgcagatattgcctagaggttctcttgaagccaagtcttttgaagctttctcatccattccaaagaactcttgaaagaggagagaaattcacaattttcagttttagccctaaacagacaacaatttattacctcttccctcttcaacactggagcctgggagtgtagggtcaacatgaagcttcaaggacagggctctattttctccacaatgtatttaaggtgacaaacttgtaggacatgagtatacataaagagaggcatatttattgctctaaaacatggggacaaagtttccatgggactcctgaaggttcgttttgtatgagcagctcattcactcattggaatcactttctgcagggtttggtgctttgcagtgtcattggttgccaggatggttgtttattttcacccagtttgacctatgagggacagagtgtgcacagagacagatgttttcacctcccgtagttttcagggactaaatttccaagttctggtaacattcagaagagttaatcatgcaagctgtggaaactttttctaacgggcaaatatgtctccttcatgaacaggatgactgagtaggaacttatggattatccaggggccttgagaagtagaccatccattggtgggaattttttccccagagttctttcatttagtagagtttcaagtatattttatgcaggataaaccctgtttgtcctactcattagaagttgaatagactttgaaggatgacacggcatagctttatagtaacagagagttcccaccactcatgaacccacacatgcatgagctccagcatcattagcaccccacaccaactgaaccatgtactccatgtactgtggctactgaacctggattgacacatcatcacagctctgcatttatggcttgctcttagattctgtgggctttgatagctatataacaactctgccctccactgtggcattgtagaatcttttcagtgccctaaaaaccctctgcactctccttgtccagctttccttgtcctttaaagttgggcagtctctgatgtttttattgcatggaacagctggctgcttctctaatgtgcaacaacacacaagcatagagcagctgtctttttttttcctttgaggatccctgagatccttcaggtagagtcacctctcacttcctaagtccatgtcagcccacccacattttaattgcaacacttccatgctggcctctccccctctacttgtcttctattcttttgtcagttaagtttctaaaatacaactctttgtatcatctctctgcttaaaatctttcaatggctctctctgcccacacttgacattcataactttctaactgacccagaaatgtgtggatcacaatgtctggaggactctaaaattttttctggaaacataagcatgatggaagtcagcctgactcctcattctgagagccaagagggagtgttcaacctcagcacaatcaggcccctcctcaaaagaaatcaaggagggcttgcaattccaaggtgcagaatgcgacttctgattggaagaggagatgtgcaggctgaatgtgaaaggggccagtctgtgtctcagcacctgcttctttgtacacaataattgtccctgcatcgtttgtcgatgggagtgttaacacagagcaggagttcctcagtttgttttgtttgtttttgttttccaagatactctgggaagaggtccatcacaacaaggccatgctagctctagcagtctagggtgagaaaggagtcaaggagataggtcacaacttctgcaggtaccaggcaagcttagggcattatttccaacccgcttgggtcccatttggacttatgtgtttggatctgttctttgtgatgctcagttcataacttgtgttctgtctcatcctgcctcatctggagtctggtttggttatacaatcattgctcagacatacccttggcactgaaaagtttcaaaggaggaaagaaaaaaagacctcttcccttttgtttaagaagttctgggacctttgaaatggctccagtggaaaaggtgcttgccaccaatcctgacaacctgagttcagcccccacattgtggaaagagagaagcaactccagcaggtggtcgtctgacctccacatggcatccaggagcacccacatgcacacgtgcatatgcatgtggggacacacacacacacacacacacacacacacgttttaggtgggctattagaaggactgtctcagcagctgctatttcttggtaattttcttcatcaaacctcacagaagcatggttcctacttatcttactttttggtgccaccctaaggaggcattccctgtagtagagatgactgtaattctagaaggtctggtaagggaaagtacatcaacgttattctgatattatatgacattttgatcaacttatgtattggtaaattatgtgaattttgtacaaagttagttcataaaccactatttgtggaaacaattcaaatgccagagaaggaagttccgttgcccgtggaaggtgtgagccatatgctccattctttcaagtagagtcaggaaatgttagcagcagcagaatgtcacaactacatgaacggtcaatgtttaccagacgttcgttttttaagggtccttgaatttattaaaggttggcagagtcttctagaaagcatcttggcaatatctgtcaagagctataataatatctgtgccctttgcctcagaacttcacttctgggaatctttcagaggaaagaatccaaaatatggaaaaagtgatatgtgcaaaaataataagcattgtggaactgcttataatgagaataggagagttagtcttacatgccacaggagaaaatggactggctagcctgggaagccatatacacgttataatgtaagtacaatgatggtgtgcatctgtcttttagttggttgcaggtaatagacacagactttggaagatgagagaaataatttattacaaggacatggtgggggagggctgtataaatccaaacagtctgaataatcaaatgcagagaaagtgaggactcagggcagtgccagttatcctggtaggagatgctgcctcagggcacctccaggggaaagtgctcactttgtagtcagcacaagaagccactttgactgacagccacacacaggagcagggtctcctctggaaatagggatgtatagatgcttagcagggcaaaatagcagatgaacagcccatggtagaatgagttctgtcttcttgttgtgatccacagtcaatatgggtacatgtagaaactatgttatgcagtagacaacaccataagctgacagcatcagaacagtatataccttacctcaatagaaatggcttaacaataaaaatatctcatagggcttttgcaaggattcagcgaagttacatgtaagaaagtacatgcacaattcccagaaccactaaaagtacttttaaaacctaaataaaggctgcaagtttaaggaatgaggttacaatagttctttgatgtttattttgtagccaacaaagattttctaggctatacatattggcaggtgaaactaattgtaaaaatgtgtgaatcgtggctccacttagattttctctggcagagctactaatctgtgtaagtaaatttgttatcacccaaatgtattatcgaagtgtgagtccagagaaacacaattcataaagtgactggataatttttccagcttttgatttgttattacatcttctgctatggtgtgtaaattgtaaattaatttagagcccttaaaagatgtaatgtataagaacatatacatatatatatatgtttattatgtagaaactgtgttatgcagtatacaacaccatgagctgacagcatcagaacaaaatataccttacctcaatagaaatggcttatttattatgtatgtatctatattaaacccaggtgatggccagagaaatatattgtttgttcatatcaattcatcatggatcatccaactcccaagaggcatttagctttagcactcccacagactggaatgttgaggcaactgtggtccatgtagacagtggctctgttctggagtctatcaacaatctcaagggtgagtcacccacagagggtgaggaggctgaggagaggcaggcatcctcggtgaacatacaaagctctctctccagccacacgctactctatatgcctcctaattttatgtcctttatgcttccaatcatcttgctctactgtcctgatctcgctgaaaaaaaataaaattatagttataataatagaagagacatatttgttttctttttaggagaaatgaatgctttacttatttatggatttttgaaatgggaccttgcaatgtagcagaggctactctcaaacttgtggtgatgctgcttatttctggcccgcctagagctgggactgcaggtacacaccacccatctggcagttcttaactgatatgtgtctgcatttttattagtgaattatttttattattatttatatttgccaacaaatataagaacacatggatcctatccctcccccaggaccttcaatcagttggcattacaatcctttatgccaagaggttcattcaaaagcataaggatagttatactaaatattagcaattatgagtatttactcttggccaaaaataagctaagtagttgaacattatatcatcaaaataatctaaaagagttagtatttattcccattttacagatgaagaaactgaaacttagtggttttggtaagatgtctaagaatcctagtgtcaacaagaaatctaagaactaaagcaagcctgactccacagtccatattttccacagggtctatgcaaatgccctgctggcctttctgcagtcatcatcagccctcttcctgtctgactaaatggccaaagcctccggggtcacgaactctcttatgatgtcacctgatagagggatcctccctctttccagcctcttatcttgcttttgctgacttcccttgcagcctttccactgtgtgcactaaagctcttttccattgtaaataaatgtcctcataccctatttccctgggctgcctttacctcccggcttcagtgcaatggtgattccctatggtgaacatatctttccttttcttgctccccaaggaaatgaggaagtctggtgaacctggaaacagacttagcacttagtatctgtgttaacctagctccaaactacacatcacatcctctcccttagtccctggaattcacatctgtgccttgagatcctcagacaaaagggaggcaacaatttcttcagcaaggcagtctctgggagtagctgattggatgaatcccctggctggcctgtgcaacctctacctccctgcccagtgcctccagttagcactgcatttccagaatcacctcctgggtccactacttggatccaacatctcaaagccctctgctgagacatcagagccaaaacaagagagagaagggattaagaagttggggacctaaagtaggttggtgtggatatcatttcctaattgttttaggggtcaccaaataatatagcaacaaactgcctgccccaccttacccctaaaatgtgcactgttacagttccattgcttatgacaacctttgtcctagctgtccatcattttggggtcccgtccacacagtcccatcttgcttcccatcttagcctctggtcagtttctggcctttcttgtttctgacattagtcattaccacatcatcagtacagatcaacactgccaaaagaaatacttctaacactcttcaccctgggacctcctcatctgcaactgcatcaccctcaaggtgcctaagccttgaactctcagacagataattccagtgtctcattaactccacgtttgtctctaagcccctcttcctccagtctagactgcacccatcttagcctctggtcagttttgagtcttccctcatcttcttgatgataaataccattttacccaaacctcatatctggcagtgttccctgaaagttaccttccctggcactttcagttccctgaacaagggtcaccttgtgctccagtcacctcaagaagtgtcaggacagtggaatcctctgagagtggcacaaaaataaggcatatgtctgaagacacagcagccagactagtaggactaaagggtatcgtccaaatacaccaaagatataaaaaaccacatatttaagaaaatagaacccatggggcatggtggtgcacgcctttaatctcagcactcagaaggcagagccagatgaatctctgtgagttggaggtcagcctggtctacagagcaagtttcaggacagccagggctacacagtgaaatcctatctcaaagattacaaaaagaaggaaggaaggaaggaaggaaggaagggagggagggagggagggagggagggagggagggaggaaggaaaaaccctcattgtttgttaaattattaatctgcaaattggtaattatagagaaaaattgaagtgttaatatcctttttgttcagcaacattgtttccacatatacaagcatcccaggtaaggagaacattttttataaatgctttttaggttctaagaaaagaggaaagtgttaaaaaaaatcactattttgcaaccactaatgaaatagctaattcagacaaagtcatgaattgtatagtagtgttattgtttctctattttctttcctagtatcgggcctttaacccagggcctcacatacactaggcaagtaagtgctctaccacttagcttcatccccgtcaatcatcagtgaattaaatcaccaaatgaaagcttataaatatggtcatagtggctggcttggaacttgctgcatagtggaagatgacattgaacttttaatcctcctgactccaccgccccagtaatttggattatatttgtttcatcatgtctagttgtaacatgaataataaaagacccagacactgatattggagttcaagcttcaagctgaagttcagaaaagcaaagcagctgggctctagctcttacctctcccccaggcctaatgggtctccatcagctctcaagtctcagactgaaagctttcctcagtgtggatatagaacgaatgtctcctactgactccctgctcctgtcttttatacccctttagtgctgtattaaaggtgtgagctataattctcttttagactggttcaatctgtgtagatctgggtggctttgaactcacagagatcagtctgtctgttaatcctgagtactaggattaaaggtgtgtgccaaaacctcctagcttttggttgctggtattaaaggtgtgtgcctggcttctatggattgtggctgactttgctttctgaatcctcagacaagctttaataaaacataaataatatatcactacacccagtttattccgtgctggggattaaacccagggcttcatgcaagctggataagcactctgtcaatcaagccatatatagtcccaaccttaagtcagaacttggagtgggaaaacttctgaaagcccctctagagtttttgctttccccattttcccttcatcagtctgggtccagcccagcctcaagctttggccatgctgaattaggcatcaagtcgataatgcccacagtgcctggcgcgtgtgcaaatgggtggatgatctatgctgctttgacatcggcatcagggaatcacaaggaggattcagactatatgataattctagtggggactgaatgactgagcaaatgagacattgtatctacttttcctcaacttttccatatgtcaagggaacgtaatatagcaatctttgattattcaaggactcacgtgaataccatggctatttccttggcaccaagacaaggggctcttctctatttgcttgttgagatatacaattcactcactttaattttattctccctttgtacctgccctatggacatcctcaaaatttaagcagttaaggggagggggtacttttcagcttattcactgttatccactagatggtcatgaagtcaaattagtaagctgccatctacattcgaatggaatggaatgaaagaaatgagtgtatggcactcagaaagagaaatcttttctgaacatctgaggtatttttgtgtctatgtgtacactgggtatattgggtggactgtaaaatgtatttcctgctgtgagttacagcaaaaaattaaagtttgaaagcaaaatttgggggagtgcgaaacctaccaaaacaatcagacaaagaaacaaagaaaaaacccagtgcattacaaatgaatggccagaagtttacccaagtattagtattggggcagatgcattagcatctatttttaacagcaccattgagtacttctatggtgtatgtacattgatggaggagagagagcagcaggagggagaaggaagagaagacagaggaggagaggggagaaagaaaaagaagagagtgagcgagggaaggagagtgtatgagatttagcagtagtaatttgattgaaccacaatttagtttaatactcagttgggattttattaaatcacatggctacatttttaaattactattgtgccgccagattaagtaatgatgtgggcttctgagcctcttgctttgaaacattccagatgatgggcgttcagttctcagagcctgttgtttgagagaacgcttagtggtcagcagggcaggcacagctccccatgagcagcccagcctgcttgtgcatgcaggaggctatctctaatggacttgatgtgcatctgcacttgcaaagtgacttgaaaaacgccagctcattttttctgtttctatatgtcagaaggtatcttaactctgtccatctgttttaatgggcagtttatttacctgtggctttttattgctctttaaactttcttaaaatattactgttttcagcaaacttggattattgcaaaagtgaattattaatagaaatgaagttttcaggtttcaaacttagttgccaacctaataagactttcatttatatgttgttaactggatttaggtgaaagatgtctgaccaaattttaatagaatgaggtccttggaagacatacttctgcaactgttcttctccagtgttcttctgttcactgacttgaagattcttggcccaacagagaagaattaactttccaaatactttacatcctagcaaattttcttggtgggcaatttaaatgcatagagctttgaaatcagaagctgccttagaatgttttgcaacagaaagcaaagatttagttttcctaaccctcttttcccctatctgtgaaatgatgatgatggtacagctttgtaatgtggataaatcaagaccgtatatgtggaagatagagtacagcccaagcagacttggagagatccaaatgttgctaccgttgattccagaagagacttctcaagactgcgagaagggtctgaggggaaaattttctatgctgggcatccactgagtacctcccaccccagttactaactggtttaattttatgagtggtaaccgacatctgtataattaattgatgaagcacatttgaaaaatcaatgtgttttcttaccgtggtttacctttgatacaagaatatctttgttctaaaggaaaatttcccatcgcagctgtttgtaatgtgtccctagagccaacactgtttgcagaaggaaagtatttaagctaagcattcatctgaattttccttaatgtgaacttcgtctaggaaacagagcttctttggggcaaagagaattaagaaccaacatatcggtcctttgaagaactgtttaaaggtgaaggctaagccacttctgaaaataatacttcaaattcatggcttccctccacagtaatttctgaactttgggcactgagcatttatttgctagctgcagatgagtggtcaggtctgacctgagccgccaaggttaaataaagggctgagaaatcatttagcctaccaccagtctgctagatgctgggtgtttgggacatttaaaattcaccgttatctttctccagtttgcctttctactacacatctgggatctttagggcttccaatttcattcagaacctgtatgtgcctcttcaagagtgattttgttttattttcacttcctcgggtcattaaaatcggctgccatgaaagtagcacgatatctaaaaagaccattactttctttacctcttgtgggctgtaggctgtgtcttccttcaccctgtactttctgagggtcttgcttctggagtcttcagggttggtattttgctgttgttactgttgctgttttcttttagttttctgtgcttccaaccatctctttcagtaaagcctttgacattttaatagttattatcttaatatgcatcagaagagttgaatgacttaacatacttcacatgactagaaatacagcccttatagcctcactccctttcagcacatgaaagaccagagaaaatcacttacttgccgaaagattgggagatttgacaaaattttatattatctcgttacagtgaaggtttctttctttctttttttttcttttttctgttttgttttccttagtctgccatgggctcacacttacattgaacaagtagattcaaagcttaggacttaactatggccaaaattctcagaaactggacggagcattcaatactatgatagtgaaaatgcagacagttatgctttgcaaagaaaaacagagccgttttccttagaaattcctttgaagggacacatgacttgacagttgtttaaaatgttcctctagggctaaagagatgactcagcagttaagagtacttgctgcttttctgggggaactgggttctgttccctggcccaaatggtggccatctgtaactccaggtctaggggatctgacttattcttcccatcttttgggggtacctggcacaaatgtggtccatatacatacatgcaggcaaaaacacttgtacacacagaataaaaattttaaaatgtcaccctgcctaagttatagagaatttttttcagctgtggtcttcatgaaaacttttgtttaccattagaaagatttgaagaaatcaaatacaaaatacaccatgcataagcagtggttccctctcatgtggctctccagtctgggacttgactctctacttctcctttatcatccagttgtcttccatgagacgccgaccccacttgctttctccacttggttttctaacagacccgtaaactcactctatgctgcttacaaggcatacttgttcacacctgtgtcgactgccatcaagatagttacttgtcaatgtactggaaagagcagaggaacgggaaaattagagtgtcaccatgaaagaatccgattgtctcaagtgtagctgtgaaaaggaaaactccacatggaaaaagaaaggtgggaagaacagcagaagagcacggcctgccctgatttaactgtgctgagcaatgtgagaggcgctgtcaaccatcatgcccatcctacagaatttttaggattaaacgaggacagtcacactacttagactaataatacatggtaaatttaataagcaacaacctgtgcttttaccctacagaaggctcatcttttgtggagtcagcatattcctgcttcccaaaatgtactttcatggccctgcagggtactaaaagcttgtcgctcttccataaggaacatttctcaaactggaccaattccattgtacactgccttggtaacattaagtgtcaccaaatgagaggaaagctctggcttagctacaattgatacaagcacagatgcagcctacaaggtaaacttgcacatggcagtcacacacaggttatatgtcatatacgttgcctctgcagagaggcagtattagcagacaggtgttcctaaagtcctaaaactagcacttttgcctagagtattaaagtaaaggctctcatcttgcctcaagttgtgctgaaaatgcagatctgtgacccagccatccctcccaaagtctagccacagggagttcctgagcaaagatgttataaacttaggtaaggaccatgatgacaagtgaacactctttacaatagcagacataacccatcacagagcctatggctggcagaaatttttctgaatgaaatagtgaggcatgtatttacaaatattggggatgagtggggccacggtggcacatgcctttaatcacagcacttgggaggcagacacaggggatctctgaatttgaggctagcctggtctacagatcaaattccaggacatccaggactacacagagaaaagacacacagatcaaacaaacaaaagatccatcatggatgtatacacaagaggacaaaggaggagtatattaccattatctcattctgaaagattcctaagaggctcgtagtaaaatactatcaataaaaggtaaagcagcaagttcacaagaaagggaagaggaatataatgaaagcaggttaattcacacaaataagatctttctcatctagatatgacgttttctgaaatgtgaagtacatgaaatgcaattaagttccaggcaataaacacaaaaggggggatggggagagaatgggctctattttgtgacttcttttattccacaagaagttaagtttttctgatttcaaaaattagattaactcatctgtgaattgaatactgctacatataaaagtgataatctcaataaggtggagttcaaaaaaagtataaaaaccaaatggctggcgagatggcttagcaggtgatgtttagtgtcaaggctgacaaccttagtttaatccctaggatccacattgtgagaggaaagaactgactcccacaggatgtcctctgacctccacacacttacatactaaataaataagtacataaaatgaaaaaagtgaaaattaaagcaattctttaaaaaaacaaataaagcagagaagaagcctgaaggacagacactgtccagccccatgtgtggcatggattttgggtcttcaacatgactcagtgcagtgctacagttagccaataatagtgattcagaaataaaaagacacaggttggaatgtaagaaggacactctgagaaattagtaatgccactttccagaattctatccagtttatgaaagtaaggaaagccgggagttagggtgaaggaatacacagtatctgcaattttccctaaacaaaatagaatctctttaggacttgtaacaggcacgtgggagaagggtgtgagtgtggttacggtatcctgacatcaatcagatcttgaggaacttggggccgcaccttttccctggccactctgtgcttctgtctgtatgcctaatctagcagtgggctgtctgtggggtaaactgtgttcattttcagtcttgtagaagaatcgggacagcagtagcccagggatttgggcagcagcgccaacattggtattagaagctttgtcgattgatacttaatgagccaagttctccccaacgtcttttctagccaccagggtgccattttgtgcagcagagtgctaaatcagatggttctctgctgggttgaaagagtccctgcaaatccctccaaattcaacttattgcctgagagtcaggaaagccatggggagagtgttacccagcaagtgaacccaggtgtctgaatccaccaaaaatgacctagccatgttccctgtaagataaaataaacccttgccaaggtggggtgcttgcagaggagtccatggccattctctgtcaaaggaagaaaagtacactgcccctgagtgtctgaaagtgagaggagtcggaggcctcaattttcccagattctagttattaatttagttaggatttgtgaccagattccttttaaacattttcagttcttttatatggaaaagaaaactagatagtcagttataaaaatgctcaaaagaggctgggcagttggtggcacacacctttagtccaaacactcgggaggcagaggcaggtgaatctctgtaagttcaaggtcagcctgatctacagccaggacagccagtgatatgcagagaaaccctgtctccaaaaaccaggaaagaaaggaaggaaggaaggaagggagggagggagggagggagggaggaaggaaggaaggaaggaaggaaggaaggaaggaaggaagccagacaagcagaaacaaagaaacagaaagaaaaagaaagaaaagcttgaaagtaagcaaagaaaggagactgccaacctttgactgtctgctgttgacctgctgcatctacagacatgttagacacagagaataaatgtaagacgccgaataacacactctgccaggagccacctgcacaccacacctccctgctccacctgcatttcttactccataaattccctcaaagggtccccaagttagctacacttattaattattgtgaatttaaataaactcctagagatgtctaaggactgtcaacacactacagtgcacccttcagagtgatgcttacagaaatgccggggactcagctgaggagagcagtaggacaagtgagttagaaacgtgagcactgtgtttcaaatctgccaggcatttcatctgtcactgactcactcctgaattctctggtattccacagaccctcaagatgtacctacgaatagaagggtatgctccacgacactcgactctatatatcctctttaattttgccagttggatgcatttatattatatatactctgtacagagacaacagattagtcagaacttatgtgaacagagcagtgttactctcagatctgttcttaggccaggttttagtgcatgttctagcttctcctagcgattcccaccattctgctgttcaagattaaatgtctgagacagaattcaggtcatagaggtgcttagtaaataaagcaggccctaaccttattatagatatttttctaccaacatctctccaacctcacacaccctgccacatccattagttagaaaaatgcatattacttgttagaactcacatgttaagaatttagtgttctggcttagtattttaccagatactatgtattcttccttaaactgttgatttcttgcttaggtattactgtcccaaaatcacatttacttgtaggtacagaatttttaaatacctttggagttttaccaaactttatgaaattaattaaaactaaattcctaagacccaagtgtttgtgagccatctctttagcaacctgtaaatttattacattcatcctggtggcctgtgagaagctcggctgtacagtgtgtgaatggtggcagtgccgttatgtgctacatagcagttgggtttcagttacggaggtagttggcaactatgtgcacatgcctcctgccttgttctcagtggcagatagttaatctgcaaaccattagacacaacagtattctgatctcgttgaaggatattgtaggcttggggagatggctcagtgggtaacagtactcacagcacaagcatgaggaccagagtcagcatccttgaaacccacaataaaacaaacaaaaaagcatgactgaacatgcctacagcctcagtgtgggaaccgacaggacaggccaatgccaggagctcgctagcctgtagcctaacccaagcagtgagcttcaggaacattgaggtgccccggctttaagaaggaaaggcagaggatagtagaaagagcaggatgccccgtgtcctctttgggcctcagtgggcacacataggaacatgcacctatacacatcagcaagtgtacacacactgtcatagacatgcacacgtgtgcgtgtgcgcacacacacgcacacgcacacgcacacgcacacgcaccgtatttactctgagccttcaattcttttgtttccattctcctttcgccgtgaagtatttccatatttccatgaggatagaatattccctgtggcttttcaggtagtttcccagatttgtcactcagatttataatgtccagtgtaaatatctcaccggcgtggtaagccatgcacaagaatacagatctggtgggcttcagagcctcagggtctccagcaaagcatgttcccgactcagctggtaagcccttccttctgcacactgtgtttgagggacagcttgcttttcccttcacattttatccatttgcactcctcacatggacaaagccatcagatctataagaagatatgatattttgatgttgagaacattgaaaactgacatggactcttgattctcccactcaaaggtggctgagaagttaatgattttgttttgtacttcattactctaaactcatcatagaccagatcaccaaggtcatcgaaattctgtatgttttaattctaaaatatattctatattaaaaataattcaagactagaaatggggggcatatctgtaactctagtgctgaggaagtagaagcatgaaaaaggtcagtgctaggccagcctgagctatgtatagacccccaactccaaaataagcaaagccacagtatattggggaaagttttatattttaaaaagataaaaaaacaaaatgtatttatgtgaaattaatttttcttagcttctttaaaaaaaacaaattgggttgccttgtcaagtaaccattagaaagacactggacatcagtgaggcatgaaatttgaacttcacttccaaaataattatcccatccaaggaccaaagtagacacaggcattcacataatccctacttatatctgccaccagggtttcaagagatgaattttccccaaagggcctctctgttgccttcagccatatatatatatgtctttttttctcccaaactgtaacactcttggaaactgtctaatgacaatgatctctgctggaagctctgttaccatctttcttctgacctgataaatgtaggctgctgagctctgtgcacgctatcttcagttacttcaggtattttcctcactggagcagatgaaccaaagactgactgaggaaaagcaatcagatttggtagccgaggcaaaatgaaaactagttcccatatgtcttttttactcagaaccagggcatgcatgcacttgttttgtacacaatgggattcttagtaattgattcaataaacactaataatgatttatccataacaagtctgtaacaggaaatgataaaaaacaatcagaaccagaaagacgagctgtgttatgttaatgccataacattgtacgttcatcttaaagactaataaaaatttaaaaaaagaaatcctaaataaatggtagctaccaagtgcctgcaatttgccagattccaggctcattttacatgctgagaatagcaactttaaaaaacctaaatttcttcttcccttggtgggcttcatattcagagtgaagagataaaagcaaaatagaaatatgagcaaaatagttacattcctttctttcttttgtgtgtctttctgtcatttatttatttagtatgtgagtctttcattctgtctttgtgtgtgtgtgtgtgtgtgtgtgtgtgtgtgtgtgtggatgagtacacacacatgccacagaacacatgtagagaccaggggacagcttgcaggaatctgttctctgcttctaccatgtggatcccaggtcttgaactcaggtcatcagactgcatcgatggcaagttcctttatccactgagtggtctcactggctcctttgagcgagttctaactctgtgttgttctcatttgtgaaatgggtagagaaatacagctgcatagatagtgatggcagtactccatgaagctgtgtgtggtgccagccccaggatggggacaaagataaatttacaggtggttaaagagtgcctctcatgtggcaggctcgaagtaaatgttgttatgactacagaatgatgctgaagacagcaaatgaaggacctgagttttgtgtacatgagaacttaccaaagcacctccctgatgttaaatgtgcacttgattctgagctttactccgaaccttgagatcgattcttcatgaaggaagaatattcatggagattttaaaagaaacaagatggtgttcttttattatttccatgaccatgagtgttaatacacacacacacacacacacacacacacacacacacacagtctgccttcctatcagatcctggatgtgtcccggaggagctcataacccacttgtaaatgagactcacttgaaggtggcgttggcacttttattttattcttttttcatgtatgtgtggttgtgcataccagtgaaccacagcatgcatgtcagaggacagccttgggtgttgcttactatgtttcagtctcctgatgttcaccactgcttatacatgactagctctctcacaagatccagggaattgtgtctctgcttgacctaagtgtgctaggattacaggttcaggctaccgtgcccatattttcgtgagtcctgggagccaaactcaggttgtcacacctgcatgttaagtgctttgtccttggagcagtcctcctagcacctcttgttaatgaccacattagcaagatcagaatggtgttatgtataagtctttactccatccacctgagccctgccaccacatgggcgcccagaataacacacagagtcttatattagtttacaatgctgctggccaaatgactaggatttcttacatgctagcttagtcttaattatcataaatctctatattttataagacttattgagaatgccttccgatggcatcctcttcccaggatcacatggcagctctgtagaaaagagagccagagaaagaggaagcaccctgcttatattctgagtctgcctgttatgtcacttcctgcctggatcacaagacttcttactacatttcccagaatcctccttgattcctagtcccacatatcctgcttcctcattggcggaaaagtgctttattcaacaaccaataagataaacatacacagaaggacattccccatcagtgttagctctcagagctgtagtcattagaaagaaggctcatgattagactagttttgagaataagcagttattcatatgtaaaggtaaaatcatgaaagagatgggctaataggaggaaagtggaccgcaggtacttacaattttgataagaaacacatggtgcaaacttcattagccatgagatgcccagtggaaacattcattgagaagttgaagatatacagccttaggaatataaggggctcatatccaggggaaataatttaaaagttacacgtgtgggcatggtgactcacacttgttatctagcacttgactggctgagacagtaggattgtcaagagtttgaggccagcctgggttatgtagtgaattccaggctatccaggactggaggattagattctgtgtcaaaatactagaaaattaaggattagagtcatatatgtgccttttaggacattttgagcaaacagtcacagaaatggttttcctttgatcagcagtcaaaaaagaaaatcactttgaggccagcctggtctacagagcagtttcaggacagccagtgctacacagaggagccctgtctcaaaaaacaaatcatgctaagaatgtgagtggtgtgatatagactcagatgcagagatgtgacaagaggatgctcaaggggaagtcagtggaggatctgcatgtgtccagcctttggacattgtggcatgatgttgtctgtgttgttatccatggttgtgttgctctgtgttgatagttactctgagagacatgtagcccacagaccacaggttaaacatgcctgtgagggggaaagcgggtaattccagggaatgtttgagaatggaaggcaattatggattccatggaagacacaaagacacaaagaggcagcatttttagaaaatacccataaatgttaatgacaaaggaaatcaccattagaagatagctatttcctaccatatttttcctttgtgttgcaatcataaattaatttttcaggtagaaacgaatgaacaagtgtagacaaaggaagaacttggggatgtaaaagaatcaggaataaatcttgctgcactggactccagcaagaatggctgggctgcaaacttctaaaaccagcaggatgctggaagcaggaggtggttcacaggttcatgctcctccagttctgtatgcagcatggtagcctggaccacagttctcacactcttagacatccccataaggaggctcagactctgccatcttcagttcaagggcaaaaggaatcattcactggtgtttattctccctttaaaaaaaaagttatggcacgcagtgagcacacttagacactatgatctaaggcatctcttggtgactacttctatcacccatggaccacacagagaacagcagcatgctcatactcaaggggaagtgctgcagaatgaactgcttttcttttctccttttttaaattaaatttttatttaaattaaaaacaatcttattttacacaccaatcccagtctcctctcctcccatcctcccattcccctcactgacccccatcccacccaccccatccactcctcagtgagggtggggcctctcatgggggatcatcaatgtctgtcacatcatgtggggcaggacctaggccctcccccatgcgtgtatctaggctgagaatgtaaccctccataggaaatgggatcccaaagttcattcgtgcactaaggataaatactggttccccagctgtcagactggggtccatgagctcccacttgttcaggtcagctgtttctgtgggtttccccagcctggtcttgaaatttttgctcatcattcatcccttcatacacctggattacaggagtttggctcagtgcttagctgtggtgtctgcttctatttccatcagctactggatgaaggctctaggatggcataaaaattagtcatcaatctcattataggggaagggcatttaaggtagggtctccactattgcttagattcttagttggggtcatccttgtaggtccttatacatcttaatgtctagttaataaaataacctgaggttcaataaggaggactgtggtcacatttgaaaggctaatatagaggttagcaagtctgcagtggacagaaagaaaggaaagagagggggagaaggaactgaaggaggaaaaaagaaaggactagtaaagaaagaatggaagagaggaagatggtaatgcatactgcaacagtcaccatgtttttggtttatggcagccttagctttgaattttatgtgatctaaagttaaagtttgtcggttgtacaatcctttgtttgccattgttgatggattggttcctgctttcctgagtttttaatggaaacaattatatcatataagaaactacctcacttgtttctattccctggcatcatatatggaaaaatacagcctcatggaattgtctgctacagtgtggcctttaaaggagaatgcaagggaagacagctctccagtgggtgttttaaaggtggagtaaagtggagaggagggcagagggggcatgtctaagttcatatccagtctttgacaattacttactaatgtttgtgagtaaagacagttacccctggaatgaatatatttttaagtcatttggttttgtattactaaattcaccaagatcctaggcaaatgatatctaacattgtctaaatcactcaagtagaattctgaatcaagaaatctcactggttcctgtgctttgaaagaatacacagggaaaagcctgtcacctaagaaaacagtcactcatagagaagcagggcttagaaggtagagatctagaagatggtgaccactgtggttctgaacacctgaccatcaggactggtaacatgctttgattgggctggtggacaaaaatcagtgaatggatgtatttgaaatgaattttcagattgacgttagttaatttaatttctagcaatccaaattgcttgaggtaaggggattttggccagaagccgcttgcaccatgaaatcccctatggtggtcactccccaacacagataggcacagctttttgaagttctggtttgctttgtgtggtagtttgctgtttcggtagctccagaggtcttaatctcaagacacaacatctgtgataatgttacatttttattgctttgaccaaatacctgatgagaagcaacttaagggagaagatgttcactctagctcacagctcagaagaggagatcatctgtcgaggcaggaagagcattgaggcaggcaggcagcatgaaacagctgttcgctcatgtctgaacagattggccacacagagggggcaagaagcttccaatgaccagctctcttcaggaattatgcttgtgtagctgcacatgtaggagctacagctactaccgcgtactttgggttattgaatattttaaatattgtacgtgttgactgtgtggactgaatccaattttcactttaatattgtttcctaatgtgtctgccacatttagagttgcctctgaaaacttgctcctagcttcttcgtgagagagtgaaactgaagtgcagcagcttcttgcagcatgacaaaggtattgtagctgttagggagtggatgcaaaatgaaacatctgtacctatgggtgcccacagccaagaataggacataattatgagtggcaacagattatagtacagctttgatgatctgtaatcatctaaggtctagtgacaaattcacaccacttgccgtgtgacccaagatgatgtctcagttcatgtggaaaataaaagcatatgctgagcattgcaaggtggtctgggtgaggagataccttggtttggaggcagtgaggcctctgacatggatgggagggagtccacaaatctcaggacctccatcttttcacaaatatatatagtattctgtaagatcctttcaactacaaattctgacttcatagaaggagtcctgatacctagacaggagatggaaagtggaagatacaaaacagatcaaacttccagaatcataaaacctggagagagaggagagaaaaaagatatagcagggaaggaaacagggggtagaaaaagggaaggaagaaaaggagggagggagagagggagggagggagggagggaaacagggaacaaattgctacgagctgaagtagaagacatggccaacaactcattacttcttacaaagtcttgcttaaaacccaactttagacaatggacctttccatgagtgacacagggccagccacagtagcacatatactgacgttactgttttcatttttctccacctcccaactacaccaggtctacactcctaaagtagtctggaaagccatggcctgtgtgtgacctggacaaaacaaaacagcatttcacacctggaatgaaagactgattgtgtatgtgtctgctgagggctaaaggggtcacagttctctgtggatctgtttataaatacattttctacacaccagattcattttggcctggactgacactgtggtaaaataacaagaatataaaagagaaatgaactcttgcagctgctgtagaatctattagtttcctgggttctttatgtttttttttttgtttgtttgttttttcttggatgcagaaaaaaatctatttcatgtgcctggttcacatgaggacctgtcacactgtgggttctaacacacctcagctgtatggaaggctggagagagctgcttctctcccacccccctcttttttcctttttcaagttatggtttttctgtgtaatcttggctgtcctggaattccctctgtagaccaatctggcctcaaactcacagagatctgcctgcctctgcctctgcccctctctgcccctctctgcccctctctgcccctctctgcccctctctgcccctctctgcccctctctgcccctctctgcccctctctgcccctctctgcccctctctgcccctctctgcccctctctgcccctctctgcccctctctgcccctctctgcccctctctgcccctctctgcccctctctgcccctctctgcccctctctgcccctctgcctctgcctctgccgggatcaaaagcatacatcatcatttcgtggtaaggctgctattcaaatgggccagggctaagataggggtaagccctggggatgtcacatctatatgaataggaacaggtcattggtggtaaaggatcaatgctactgacactctgtccttggctatgccctgagaaacttagtgtcatctctgtggaaacattcattgagaagttgaagatatacagccttaggaatataaggggctcatatccaggggacctgaagtctttctgttgaccttctgtgtactgaatgtaggaggggtagttcattacagaggcagagagtgaacttatgtactgtatatggcaaaaggacacccaatagctgaagagcccccacccccaaggcctccctgtataaggaaaatgttgcctgcagcagctttcagagaatttcctcattctctgctgatatacgggtgacctccttccctcaagtctaagttttcagtcttttctaaacttacatgctcaactgctgaatggccatatctcctggggacacccagtttctggtcacaatggaccattttctccaaatatgttccttctcctatgctccatatgctgacagtgacgggtcactccttcccactcattttttgttgttgttgttaaaaccaaacgcttcctattttgcctttttctgaaaggtctcagtcctgtcatttctttcatctccattactgcccgactccctctagagctcacattttcttactttcagtgctacaaaaatatcccatcaaggatcccatcctgggctcatccttgccagtgtgtggctgccaagtggtctttctaatgtgatttcattgtgacgtttaaggtccttaggaaagcaagccaacacaccctcaatggctctgtgctattccttcggctagaaagccattggactccagcaagaatggctgggctgcaaacttctaaaaccagcaggatgctggaagcaggaggtggttcacaggtaacatccattttcacagtctaaatttctctgcccctttgtggtagccactgactatatggtaagactgtaagtcttaacatcttcaatcgcaacatgtcactgattagctctgatgacaattgattgctgagctgtccactttgctcctctgcaagttcctcaggggaaatgcccagctctgatggactcacacagtggacaaccacagaaaaaacacttgtaaatgtcttccttttgccagaacacaaagcacatatgaggattaattgactgcatacaggaagttgtcgtgcaagttagccaaaaagttagttctaaaatggtctgctcccccagatttccttcagcatgacaaaaagggaaaagcacaactgatatctggaaccaattttatctctgatctggaaacagtaggattagattgtcaagcacctgagctattcactagagtcaagagctctgaccaaggggctcaggtgggggttgtgaggcagccaggacactactggatctttaagtcaggtgccgaggaggagtttgaannnnnnnnnnnnnnnnnnnnnnnnnnnnnnnnnnnnnnnnnnnnnnnnnncccaatgaggcctctgggttgagaaaaactgtcctgagagtaggaattaaagacacaaagaaacaagaagagctcccaaacagaaagacagagacagtggcagagcaggtagagcattcattttgtttacctccttgacgttttcagtctacctaattagtacctcatttggctctgctcaagatatctttcatttgttaaaattattttatagacacagaagttatgaatttgttacagtgtagtaggtaaaagtgatgcattctctatgtacacatgtgcaactgcacacatgtctgcacccacccacataagcatgtacatgacccacccccatatacacacaatgatgcatccttcatggccacttgtgcacgctcaccagcagttatcaacctgtggatcacgaccactttagcaaacttttatctccaaaaatatttgcattactattaataacagtaacaaaatcacaattattgaagtcgtaatggaaataattttatggtttggggtcaccacacatgcgggtcacaggattagaaagattgagaaatcctgatgtacacacatacctcccccacagtgtgtcctctgttcacacacatgcatacatgcctgaacacacactccaaacacaacacaagcacatacatgcacacgtgtgctcgggcacacacacacacacacacacacacacacacacacacacagagtctctcctcaatactcactgggagaatctgttttttgggttttttgttttgtttttcagcattgtgacacttaagtgatacttccaatgtcatgacaaatctcagataactgagcctccagtctgtctctcctaatagaactttttatacagcatggacactgctttgtatgcaaggctgcactctgctttattataccttcaacgtatgtatgaaacatcatgtacctcgaatgaatagattttgcaacatttatctttgtgcatttaatacttttttaatgtaagaaagcatagcatttgtttacatgggatgaaagggagaagtaattatggaaatgcagaatcagacatctggtttttctcgtattttgtgaccatttctctagtcacaccagcttggtaggagttttaaagaaatgcatgtttaagtgtatggacccatttaactccaacacccccagaatttgcttcttataccctgtgtcaaatagaaaattttgtttgactagacgtgatggccccagtccagtcgagcacagccctaaggcatcattctcgactttggagccagcttggctctattcaagaaaagacagggacaatttttttttttcctttgaagtgtctcccagtgactctttgctgttttataatttagggctaagctttaaaagcactggactggctatacacaagaaactatttgtgtaactttctctctatagacagagatcatctcttcattaactactttctctagaaaaggagaatgggaccaggtagcccatggcatctactttgtggaaatgtgccttccccttgaagatctgcagaatctgcacctatttccaaagaaaaggtttctcctgtcccctcaggcaccagtgattgtttggaagctgatgttcctgcttacctctgactggaaccaacaaatccctaaaactgttcaccatacttagacatttcccatcattgttgactctgtatctgaaggaatacagatttctgggtgttggaggtggcctcctctacgagttaagaattaatgatgcttctcatgttattgtgactctgatcctattagaagttgagcagacagaatggtggaaatgaaaagaaagcatttctattgattgatagcctgaggaaacacttttgtagaaggactattaatgaagcagatatgtgtcaattgggggaagtcaaccagtagtggattctccacactgctccaacccccagtttagaagatctggaactgagatagcgcttatacaacattgttttttattgtctcatagcctgagctcaccaagaaggaagtaagactctccctagtgttgagataaaagggaatctgcaaaaggaagtgatgtctaagtactagttcatcattacagttttagtaatcattgttaggggatctggctgtgaaagttagtctctggtacatttttgtaatagcaggtggcaaggtgcaacctaaatacttacccacaggggactgagtacatgtcatgatacatctgtgcaatggaatagtatgcaactcttaagtgacacaagggccaagaagttggctcagtggaaaaagtgtgtatcacacaaacatgagaacttaagtgctggtgtccacaacctatgtgaagccagatatggaggtgtacatcaggcagatgcaggcttaggagaatctctggaagcacaaataccggccagcctgctccatagagcatgatcaagagactctgtctcaaacacacacatgcacacatgcacaaacacaaacacatgcatgtgcatgcacacatccacacacatgtgcacacatacatagcacacgtttatgtgcccacacgcatgtgcatatatagagaataagctcacaaagtgggtttaagctcacagagcatctgcctttatttatgtttaggtaaacacatcttctctcttactctaaagaaagctaccaaaatatcagtagcagtttatagactcattctcttggtagacctttaatcatgttagaatatttacaaagaaaatgtatatttccctcaagtcaaatgtatacttaagaagcaaaaccgagctagtatcgtgagctgccatgtttcttagtttctgtttgaaattccgctgtactttctgaacagttccacattcataggcttattagaaatacttttaatgtcttagtaacctattttttcaaatttcacaataaaataactttatgatccataaaaattaagtagtatatagaggaaatgaactagaagtaataacaaattaaaatgcaacaagaggaaaatgatagtactgatacaaggatatagaaaagggaaaggtgtcaggcggtgctggcgcacacctttaatcccagcacccagaaggcagagacaggtggatctctgtgagtctgaggccagcctggtctacagagcaggctccaggacagacagggctacatagagaaatcctgtctcaaaacaacaacaaaaagattaaattacttttaaaaaggaactaagaataaataaaaataccaagaaattctgaatcaaagaaaagaaaatatgaaaacagaatgatactatcctgcaatgaaaccacattatattttataaaaacctaaacccaaggattcaaccctaacaacagttcaaaaaattcaaaagaagaaaataatacacaaggtttcatgcagctcaggatggcctgtcactcactatggagctgatgacaacattagattctcctgattctgctgtccaagcttccagtgtgctggggttataagcatgtggtacccacccctgcttagacaaaatgttttaaccttcatggtgtgtttggaaacagagaagcaggtatcttcctcttgtcacacatttgctatggactctgtgttcttgctgcataactactatcctataagttagcttatgtcaagttctcaagaattctctggagcatcacccaggttctgcaagaaaaagggtatctcacaacaaagtcgtttgccttgttacgtagtttgtacaaggcataatctggcttccagtgtagctttctcactcccaagttcacctcgttgttttatggttagtgctgtggaaaacactttaagagaaagtgaaaaaatcaaaataaaataaacagagtgaaaggaataaaagcatcaaaagtagtgcttcctaaaattagcagccatttctttgaaaatgtgaaaataaatagctttcatttacgtgaaattgctatttagggctagggataaagttcactaaattcagtctctcttaatttaatttaaatacttactatttcttcaagaagtaaatatactcttcttctgaaacatttgccagtgggaatgggtggggagattcaaggccataaaagagagacgcttgtgttgacttccagactcaggtccaatggttttgttgctgtgctaagtaataccacactttctcagtgtatgggatgccacctcccattgtgactgtccttttgtctccacggtaacagctcttcctgtgaccagctttacacagaaagtttcttcactgagatagtcaagaaaagaaaaataccacataaacccgaactctgtatcccacagtaagggatggaagaagtgtttgttgaatgaaagagcaaaatagaaatggcctcactgcaatggaacgttgggcagatgtgccctagcatttgcacgtgcatctccaggggttagagcaaatgttcacaaaatggaaaggcagaggattgtcctggcctccctttagaccctgactacagcgcacggagagccatctaaactgaagatttaaaacagcttcactgtgcccctctgagtgcaagggtcagagtcatgttaagtaaatgagtctgttttggagaaaacctgcaaagctgcattccaggctcccaaaggcagcgggcccgggggtgtgtgtgtgtgtgtgtgtgtgtgtgtgtgtgtgtgtgtgttagatcgttttaaggccaagtgctggtgtttgctgatttacagagctttcttgtgttttcagcttttgcaaactttcatagccatgtccatggtctctgactctgggggctgctgcaggcattttacttagtagatgtttaaataccggctactgttgtttggttttttatctgatcacaatctgacacactttcttaaaatgtttaaggttctggccattgaccaaataaaatttgaaagcagtgtgaaaattctgatcatgataaggtggatgatcttgcaaaatagcagagtattgtgtctagatgtgccagccaatgggttttatagcacacatcaatcaaatgagacacctttggaggtatctatcctctcaacaaatgtttattgagcagccactgagtaccagacatgtaaagtgggtacttttttattgttttgtttttttgcttgttttttttttttttttttttttttttttttttttttttgagattggttctctctgcataatctagactggctttgactcccagccttcccacccccacccctgctctgctccagaggtctgagattacaagcatatgacccaattctcagtttagacatgtgcctatcaaacaaaaatctctattcttgtggaacttagagtctcgtgagaaaaaaaaataaaactaatatcacatgatgtcagttgggcaggggtcagtaagaaagaggaggaccttaagagccccctgagaagggacatttgctccaggacctgagggaggtaagggagggttactggctagcacaaaaaaagagggatgagaacccaggcaagctgagcagagtgtggaattctcaggaaaattcctggaatgttctagaaacaaggtgaatcctatcgttagaagagtaccccactatgagtagagaaatagagggacaggggactggggactggcagcagatctcatagaaccctgaagacagaggtctgccttggctctttaatttgagtgaggtgctggagggatttaagccggaaagtagcatctgctgatggaagggttagatggactttttagatggtcgttgtgagaagagactggagggagaagagtcggaactttaaaggagactgtgaaggcagctgcagtgtattataaataaaaaatggcaccctgaaatagcctgatgggtagaaacggtgtgatttgctggattctgggtaactgttagaagcagcagcagttttaatggctaggatgtgaacctgttaaacaggaatcaatagactccacatcttcaagagcacctagaaagattgggttgcctttggcttagtggaggaggagctagcaggaagaacaggggctcaggcttggccgtggtaggcgtggggcatctagagaagctgttggtattcatgtgtctggacattcgggggagatggctgggctccacagaaatctgtcagtcaacaatgtctagtcataggtgtcactaaaagccaggctactcaatgcaaagtctctgagatgtggagctctcaatatttacaggttcaacaaacaaacaaacaacagcaacaaaacagagaggagccagctcaaaagagacttataaggcatggcaaacaaagaggaggacctggaaggaggagtcatacaaaaagtcaagatgtctgggtgggttgttcatgggaatgccagcagtagctgaaggagaaaactggggtcccttcaataaccactgtacccagtgctctccccagagcaggccatctcacagccttcaggttggacagggagctgaagcagatgtctagttagagtcaccagacttacaggaagggcagtgacccacactgtaaagacctaaaaggaaggctggcccagctcacctgctgtgaaatccccagtacaaaggcacccaacagtgtttttataattctccttttctttttaagtaattttgaatttctgagtagtttatgcatctttaattctctctagaagctggggtggggaagtagcagagacagacttgggagatggctctatggatcatgaacttgttacacaaacatgagaacctgagttcaaatctctagtgcccatgtaaatcccaggtggttgtggcagtccacctgtgattccagagcttggaggatggaagacgtagacaggagatccctgaagcaagctaggttcaccaggggaccctgcctcagtgacaaggtcaagtgactgaagatgtgtccggatgttaatctcagacctccatgtgcatactcagtcacaaagactttcttgtgcacacatgcatgaacaccacacacacatgcatgcacaccacacacacatgtatgcacactacatacacatgcatgcacaccacacacgcatgcatgcacaccacacacacgcatgcacaccacacacacatatatgcacaccacatacacatgtatgcaaaccacacacatgcatgcacaccacacacatgcatgcataccacacacacatgcatcataccacacacacatgcatcataccacatacacatgcatgcacaccacacacacacacacacacacacacacacacacacnnnnnnnnnnnnnnnnnnnnnnnnnnnnnnnnnnnnnnnnnnnnnnnnnnnnnnnnnnntgcatgcacaccacacacacaacacacatccatgcacaccacatacacatgcaaaagaagcaaaacaaagaaaacagaaccgtcactgccatggtacatgaaacagattgtgacaccagagctgtttgttctgagctttctgagttgcttctcagtctctggcagttcattcaaaccaaatgcatgtgtattcaaacccagcttgttttgcatacatattcctcacccctgttgcttctgagttttaaatgtttgcttcttggaacctcacaggtagaaaacatgtacacctccctttacagatatgtactcatggtgctcttgtaggagggaaaatggaaattcaaacaccacctgcaccccatcataatacataccagcatcttggagcatagagacggctccctgctggttcagagtgtacagcctgtcattgagaagaaagtcactaccttgctcctagcgtcgccatggaatcccatttcaaattgattcaacagatgtctcttcttgtaggaaaaactgtcaagttgttgtagacagcctaagaaaacaacatgtggggtgggctgaggaggtcactcagtcgccgaggagtgaaaagaaccctcccccccctgcactcccagtgcatcttctccagagactgggcttacttccccatgtttgagagacaatccctcgacaattagaatcagcttcctgtcccagcctaaagtgagaccaactcaagccaggcatggggtgatggtaccacagggaagacccaacaggtagcactgtcctccgggtccccgccatgtgggattcctatctctgagaagtaccagccagttagcagtggcctagaatgtgaagtgagagccagcctcatgtgcagcaaaagagaatttcatttcagttgttcaattaagtttcattttttggttgcctggggaaaactaaagaaaggttttcttacttttgtccctcgctctggttcccaccccactagcgaaaaactgagcaattccacattgttgaaatggctaggttgtgtttgtattggctgaattaagcctctataattatatatttcctctcttttgtctgttagtgcttcaatattaatgtgggacagaaatttcatttaatgaggacatgattttcccattgtcttagggttgtttaaaccacagctcatctccattcaagattccccatgttgtagccctcaactctgaactgacactgaattctgttctcaccaagccgtgcattttttacaaaggtccccatggctggtgcatttgctaatagatggttcttttcttgccaggttttacgtacaagtgagattatacacgggaaatatacctgccacaaggggcacagccttttatccagacctccatggccgtcagacacctatatgttactatagcaaactgtattcagaatatgccggggtttgaaacttctagaatgttttgagacacagtagttagttcttatcactctactgtttcttcgggacagccatcctgcagatgggcagcttagcactggcaggaatctacaagttgtacaggctctagtcctcatgcagctttgtatatttctgtgagcacggccctctctatgcctgcttatgctccacgtagtctcaccctcagtttatttaatctttggctgaaagtttatgccccttgcaggagtccttcatgggaagaggcatggctgtttgtccatcccattttctgcctgacctgaatctcctcagtgaagcaagggacaggcatcactgtgcagtaagcatgtgattctggcattgactaacttggcctgttctgttgtttgtggatttctgaaactgtctctatctagtgtgtaatgaaaatcacttgacactagttttgtctgctaaagagtagatagagggccgggcagtggtggcacatgccttcaatcccagcactcgagaggcagaggcaggtggatctctgtgagttcgagacaagcctggtttgcaagagctagttccaggacaacctccaaagtcacagagaaaccctgtcttgaaaaaccaaaaaaaaaaaaaaaaagagagagagagagagagagtagatagggaggttggggtgttgcctgcctcccaaggaagacctaaattcgatcctcagaacctgagtaagaatgtgctgggatagatggattggggtaggtgcttgtaatcccagcactgggtgggggagagcatggagatactgggctcactgcccctccagcttagcctagtcagtaagctccaggctgagagaccctgtctcctgataaacttgatgataacctgagtgacaacatcagaggttgtcctctggcctacacatgtaatatacacacatacatgtattctgcatgaatacacacacagggagagaaagagaaagacagacagacagacagacagacagacagacacacacacacacacacacacacacacacacacacacacacacacaaacacacacacaaacacacacagagagagagaaagagacaaagaaaccgaaagagaaaacagtttatgtagccatttgaacttcttagggttaatgtaacagcctcagtaataagttctggccctttgctaactgaaaaatggggagggggtgtctcttcaaattcctctcctgaaagaacatagtaatttcaagctgaagatgggcatgtttagtgtatggggttttgcaagaccaaattgctacttcttatagcaggaatttaatatactgtgtgatgtctactgtggagaatgttgaaaaaggtgatttgtgacaatgtcacacttttcatttcaggggccacgaaggaagtggttcctgccacaatccctgcaatattttactggctagtgtaatttgcaattcttaatttgtttataagctctgagtagaaactaccacagtagaatggctgaggagagagtccaggatggctaacataaatgaagagaaatgcaaacgacttgcactgtgtgcagaggaggctcaggaatagaacacatttttgcgtgggtgacacacaagaacaggacatgttaacaaggaggaattgagttcagccataaagtatacttgtgcacactgatggatattatattggaatggattatttttgcccatccaccccctgcacatcccgaccagtggtaggtattgggttggagatctttctgtttctggcagcatgaaagagtcagggttcccagctgctgagtggctgagtcagggtttgggtcttgtaaaagatgatctgagagatcccacacttgctaactaattctacagcagcgtgtagcagcttgctttgtgagggaactctacaagcaaactctgtcatggactagatgccacaaggcagggaagttggaagtgtacatgggtagctgtgagcaaatggaacaccagagcctggcaggggacacactcaggtcaggtgatcaggtctcttccctgaattaattataatgaacacttatgatagagagatttctacaaattttctcagattttcttcacaaaagcccacaaaagaagttttccaaaacacaccgttacagatcttctaagagggcacaaataggcatgaagagattgggccaaacacaaggccacaccttttcttttaaaagaaaggaagagggggggttagaaacatgcattcaaattccttggctccaatagggtgttgttacaatgagcactcacaggcatcctgtggccacatgaatgtttccatgcccatagagccagagttcagctcaaagggcatttaccctgtgcttagagagcatggaaaaatgaccaattacaccccaacttgcttttcttacagaacatgtcaactttccctctcaggaaacaaatgtcatcagtctggggttagtgcattctggggtcctaaccctttacaacagatacctgaatgccttttaaggtgcttgctgtgtgtgactcacttgtagtttgatgttctgtaagctacatgaacagattttgattgagaaacattttagaaacgctgaacatatcagagtgatgacataacagtgactaacattgctggtaaattgctggcattgtaatggcgttaacctttttttgattcagtgtgtttaccccagtttgttttatcttgccttgtaaatggctgtgttggcattgaaacattaataagcactgttggtcttcctcacagatctcactcctactcgtaccagccataggcaatgtattccagacataccagaattaaacgtaggattttggagaacatttttattgacttggaataaaagaaaagcagcataaatcacaactattaaggagatgatagtgcgcctacacacagggaaagtaagtagctcagatacaattagaggcattgtgatgccacattctacaaagagcaaacttttcttaaattcccaaggaagcagtttaatacaagagacaagagtagtgattgctatcaagtctcaccaagagaattaacagagacatatatgcacagttatcagaaatttttagtttattcagagcaaacaggcctaaaagcagttagaaagtgtagaaaggtgagatcatagtgaaccatgaaaacatgacactggcactagtgtgtctgaaacttgttgcttctcaggcaaacaagaaaaagcctgctgaaatggctccatggtaaagagcacacactgttcttcgagatgatccaagttcagttcccagcacacatgctgggcagctaacaactgtttgtaactccagctccagggcttcttcagacatggggcagccacacataacacatacataaatataaaaccagaaagaaagaaagaaaacaaagatggcattcagaaaaacacaaagaactggaaagagcacggtctataaaggatatgctttgcaaacacaagtacccatgttcagtctctagaatggacttttaaaagccaggcacagtgggtcatctttacagtctcagggctgagaaaaaagaagcaagaggactcttggggattgctggccagccatcctactcaactgggctaacatcaagcctgttcgaccctgtttcacaaaacaagatggggaacctgaggaaagatactcgggattgtcctctggcctcacacacatgtatacacatgcacttacacacctaagaacacacacacacacaaacatagatgaaaaaatggcttcacatcagagcagatgatgattaaaggaagaacaaaagagaagtaatccaaacctaaaggaagattttcaactgaactttgtgaattttgtttatgcaaaactaataaacctaactgaggcttacagtaatgtgagaacatggcacatgacataaaccagagaattaagtgtttttgcttctcacctctgtgtaattttaacctctccaagtctgttttatggacacagaaatcaggattcactagactttgtataaaaggagtggagtttatttggggaaaagaactttcacagaaaacaagtgactgtggaggctctccagctccaaggatgcagaccctgccaccctgatgctctctgcaacccaaaaggggtttcctgaccgagccttttccttttaaccagaccagaaccttttccttttaaccggtcatatctgcacctgtgaccacaccaaaaggtgtgatcaatgctacaggtgtggaggcagatgtatcactacaccattccatgcnnnnnnnnnnnnnnnnnnnnnnnnnnnnnnnnnnnnnnnnnnnnnnnnnnnnnnnnnnnnnnnnnnnnnnnnnnnnnnnnnnnnnnnnnnnnnnnnnnnnnnnnnnnnnnnnnnnnnnnnnnnnnnnnnnnnnnnnnnnnnnnnnnnnnnnnnnnnnnnnnnnnnnnnnnnnnnnnnnnnnnnnnnnnnnnnnnnnnnnnnnnnnnnnnnnnnnnnnnnnnnnnnnnnnnnnnnnnnnnnnnnnnnnnnnnnnnnnnnnnnnnnnnnnnnnnnnnnnnnnnnnnnnnnnnnnnnnnnnnnnnnnnnnnnnnnnnnatttccactttagttgtggctctcaaactttaggatgcttttggaaaatgcatgtttccatatcccatacctaggcgttgaatgtcaaatgggaagatgcaagaacttgagattagtaatgggccagttgggaagtggtctgttaagttaaagactaccattggctgtatgagctctgactgtatcaaatataaattttaacatgtagaactttgctcatagtgtcttacgagaaatttgacataacatattttggtgggagaaaaaaatatgctgtagcccaagatgttcaagaactcattttgtagcccagggtggcctcaaattcctttaaccctatgcctcggcctcctaagtgttgagattataggtgtgagccatcacaatgttgacaaccaaagtttcaaaatataaaattaaaagaattacttaacacaacttttgtagaggaacaacatggagcatggggcctgagggagggggcagttagaagattgttgaatgccattccaccagctaagaccaagaaggtattttgctttttcctttcctgagttagatcactaccaaagtttcagagccctgtattttcaaacagattcaaataaggagagggtccctttagctgaaccctttgtttcatgaaagaaatcaggtttgaagcttataaaaacaaaattttaaccatcaataaacacagttatggcttatagcttatagaataagctttttctcaataaaccacttgaaccaatgagcacagtcatgatgctaagtgtgctgggtataaaattcaaaaaaattatgaagttccatgacactaaaatggcttagtttcctatcactatgcactcttctttccttcctttccctccctccctccctctttcttcttcccttccactcacctttccctcccttcctccttcccttccctttctctctttcttcttccccctctttcatacacatttatttattatctgggggaaggggtatcctcatgtcaccactcccatgctggagtcagatttcaaattgtggtggtcagtccttctatgatgcagattccagagatcaaactcaggttgccagacatgaaattaagcacacttacctgctcagcaatcttatatctgcccccctggatatcttttatattgaagcagaaaagcactgaagagattttcaggagaagggatgtcaatacttttacagagaggaggtaaggccctctgtgcagaaccttgacttgaccatgccttgacctgagagagtaaggtggtggttacccttgacacaagagagcagctctgtccttgagctgagcctaattttgtctgtgtggagagatcacaggaatcatggctgccctcttcttgcttggagcaacctctggactgtgacataaagtggatttgcaagcagttgtcttcagcatacccactggagacaagcaagatgtttcacaaagggaaactctaggcaaacaactgcagctaaagacagcactgcaagtaaacgcttccagatggagactggttgccactctatgctccgtagttctcactttgaagcattagtggggaagaagccttggaggaaagctcctcagaatccttggcctgcctttccaccctagcaaggctaacctagagttacaaggggaaaacacagccaaataaataacctcagtctattccctgtagtcaatcagcatatgcttttcagaaaaagggaaaaaacatctgaggaacacaatgctgagttggaggaacatcttgagtgggctgttcttctcttaagaaactataaaggctgtgggtagccgtttgaaagagcctggtggttaggggagctacataaaggaggaactttaaggcacaagttggaaacagcaggtggcaattaattgcagcatagagttgtctgccttctttcccaccttgcaaagctctgaggcttgctttgtttaatctttatgcctacaaaaatgccattttgcccattgtttttcttcatcccatcagcccctcacctcctataactccctgtactaaggactggggtactagcatctgcctgaagcagaaacacatatatttcagtcaaataaataaatgacaagaaacaaaagccagctacatcatattgttcttttccttgctggctggcatcaggcctggcatcattgcttatttctttagacattaggtagaaggccccatactcatggaagcatccctggctgggatccaatgtggcaactccgttcacttcacttctcaggcctctaggtttgaccactgtattctgtgacttgaatgtttgctcacacaagttagtcctgcaatggtggcacccaagacactggcgagtaagtgaagggaatccccctctttagagatgtgcatttcgaaccatagctcatgggatggctaatgaggacattgacctccgtgcttctctgtgctggcctcgcataacaacaggatgtgggttttaacacatgtaagttcttcaagtggcctctttcagtttcattctgctttgggcactagaaaatataaaccacggttttaaagtcatctgtttttcttgccattagtatgcttttattacagttttaagccccatcaggattagattctattcaggtatccgagtacatgcccacatatatttaatactaattatacataatacagtatgcaaataaaatgagatagttacaaagcaggcagaatatgatgtgtacaaaagaagtttcattttctgtaaatgtggaaaccaagggtgttcccctctgtcgctcgagccttcttgttactatgcttcctggtaaccaaagatctaagtgaccaggacctcaaaataatcatgaactacatatagatcctggtgagaataaaagataattacctctaaatgaattgtttaagaagttgtcacacttgagcgggctgtgaagtcaggagcaggtagagatgtgcctgtctcagaagctacagtataagtaagagcagaagggatctgactgtgttttcactgttactgtaactccgccttctcttcactgtctctttctcctctcctctcctggttccttctcgttctcttattgctcatcttgtgggtgacacctgctacccattcacttcttccttgccttctctgctcccatcaccccaatatatactatgaagggggaatcaaacagtcatccagcctgtgggcacaatactgtagaattttttaaatttcacatttgaggagctggagagtcagtggttaagagcacttggtactcttgcagaagactggagttccactctgagaatccacatgaggcaatcttaaaagtgcctacagcctcagctccagtagataggatgtcctcttctcatctccaaatacacccacaaacataaacacagacatatatgtccacagatatgagcacagacccatattaaatatttaagaataaataaaatattaagtgttgagtagtcctagcactgaacttgttaaagaagaggtttccgtttcagttgacactatccaaaacaaacaaacaaaaaaccccggaaggttctttcctagcttttcttcatagtgaagaattctttagatggtacactctgtgttatgctgcatgaacaaataccttgaaagacaagtcattccacatcacacatcaaaggttccattcaaccccaaatgcctggcagccctctctgcaccttcttcactggtttccaatggaaataatgtacagtgagttccagcttcaagcctgcacagggtgcagcatggagactctaagaagtcactggattcctactcaagaacgtgctgcctactggaagagaaagattcaaaaaataacaatttcagctggctgtagtggcacatgcctttaacccagcaggcagaggcaggtagatctcggttagttctggtctacatagcaagttccagccagtcagtgccacataaggagaccctgtctcagcaaagcaaacaaaagatttattccaaggcactaggagaaggttcctaattgcagagatctgtgctgttaagcagcaatagaagccagttatcacttctttaagggagtagatgagttcctggaaatttggcatgaaaactaagtttgtataaatcccaagagttttctacaacttcaccgtgcaattggaaatgttttcctacagaacagtctttcaaaatgctgaatgtaagacttgggatcagaaaacatgggtattgcatccatgttttgtcctctggagtttaaattttcctaggtaatcctgcttccgtttgccatttccaccttgccactcatggttttcttcttgcaatactttgctgaatctgggcttggcgctaccttgggaccacaaatatgcctttctttctatgtgggatatcctgtcttctcagcttgcctctgagttttacttcctcttcctgcatttctgttgagataattgtggcatgtagtacagtccaacaatacactgtctgcttggacagctccaggtgttgaagaggactaagttgctatctgttcgcttcatgtgttaatttagaatgaggaatgtctgcatgtctttatttatttaataaatatttattagccacccactatgcataatcagaatcacacttcatatccccgtgggcttaccaggtggcatagaaagacaagcactaagtacttgtttgtaaccatgataaaattacagaggacaaatacaggtttctaggaacacatgtacaatggaactgattttggatgataagtaaaggccaggaaaggtttcctggatgggtcatatctcagctgagctcttcagggtaagcaggatgtgccgtcagaaagaatgctgagcatnnnnnnnnnnnagcaggaaagataaagatgtaggcagccctgggcagcaggaaacatggaggtgtaggcagccctgggaagcagggccactgcaaagacaacagagaggaatgaaacgagaacactagattctgttcccaggttcaggcacttcatttctgacttggaggttttgtaaatgtgctttatttgtgtttgcgtctcctccaaatagcagaaggcctatcttacttagattaggatataagggggactgtatctacataaaacaaaacatctgaaagtactcgagagttggaacaggtcgtagagcaacccaggcccagcttctgtctgcaacctgcccactccccaccccccaccccatctgtgattctgtccttcccttatccagaaaaggcctgggcccagacacagacacccattcaggcaggaggaagggggaaatgtactgtactgggttcattttcagaaaagcttgagtcccaggaatccttggtgaatttcttcctggtgtcactgcccagaacacaggtcaaatgataaagaacttagggaaagtggcagcagtggagagggagctaggggacataaatggcatttgactccacttctgggcttcctcacctcaaacagggaactcagctttctggccggcatggggaaagctgcagctctgaggacctctatgtcagaaggggctgtgacattaattagctaagctcccacaggacactagcgagtgatcctcaagagccacagagaccatcccattctgtgtctctcctcggcgcagtgagaagacactgagcaggtagacagcatgatcatgtctgctttagacagaggcctcggtttatcctttaacacatatgtcccattttatactactgcagaattccagcatagcgctgtcttcgtctctctttgccctgggcttactctcctttgtatttttcctttggcgatctcagttgttttgagatgtgtaaaattaaaaccaaatgcaggtgtctgaggtcctttgattttgctttttttttcttttttaagaatctctttctttttttaacttggggcaatttaatgccagaacagcaatacaacaactgtcagaacttccaaaactatttggctgagaacacacgtatagattaggaaggaattagcccccacaatttgactgcttttgttgacctcctgccctgctactaagagccatgctgctcttcgtgtgcttaaaggagccagtgtgcattccttcactcccccctcaccccaggctcttccacttccttcctatggctttttttagaaacaagtgtgtttttctcacgtccggcaacaaaggatgttttgtgctgctaccgaagtttgtgtgtgtgtgtgtgtgtgtgtgtgtgtgtgtgtgtgtgtcttacttcagatcttctagagagtgctgcctgcatctgagtagagtgagcagagcttatctccagggagtctctgaccgttattcttgtctttgtgtggctttgccacaactgaacttcaaaatcactttcctgtgcgttttaaaataatctaaaaacaagcattgaaattaactcagaaatcccatgcaagtttttaatcctttaaaaaaagatgtctaagacattttctcaatatattgaattgatcctactatgtcttttctgtatgtttgctttttgagaaaggtcttatatagctcaggctggtctgacttccttgaacttctgatcctactgcctccttcactttcctgccaccaccatgctcatcttctatgtctttcaaagattgtcgtctataccctaaatatgctgggtaacgaatgctatgggcagagagagccaagatgaacaaacataatccgtggtgatgttcgcagagagaaactgccaggctcaggtccagtatgctggatcaccatggggtatctcctgccattacacattcccaccatgcaattgtaattcatctagcaacgagacaaggtgggataacaaaacctgtcacccaactgaggggtgtgccacagctaacacaggacaatgtaccttctattgtctgataataaaaatcctttaaaacatgtactgaaatattttatcttttctggaaacaaatatggagtctataccccaggctttctcgctcagtggacaaagtatgaatagatatgaacctttaaacttcaagcacattttggctttggtgtcatgtgccacctgagcaccccacccccaccctgcccagtacaatcaaagtattttgaagagacagcagttaattgaacactgactagccaccaccttggctcttccataaacaagatgacattggagatattctgctttagtaaatgacaagtcctggagtttagatatggagacatcctctgtggggttcataagtctcctgacacaggcaggaaggaaagaggcttgtaatccaagatcaattcagtgtctgaattctttggcatttgtcatgttagctcagcagagctcagatgacttccaatagttatcttaacatagatttttttcctcacgagggtaaatcaaaagatttagaaaatcaaagccagattcccttggattgtctcagaaacaaaacaaaaggaagctgtggagtggatgaactgggtggcttgttttcacacatgatgcagtgaccgttggcgtgttttgtttcatgtacccagtgtctatcagcagaaccatgctatgatgccatctgggggagtatacaaaatgatttcagggcacgtaagtttgtttgaggatctaagtaattagagaatatttggtgttttaatttttacacatttctttacttagcgtgcatgaaagagaggaagagagaacacatacatatctggatgaggctaacttgtacgcttggcagtatatgggagcttggcagtatatgggagggggtgcagtaaaggaactgcagcccacggtatggttaagaggaaggttttattgtgaataagagagaaaaaacatccagatgtgtcaggaagaatccagaacagaaaaagaaagcagatgtagccagggctatctgctagaggagggagaatagcaagggggggggggggaaccctgccttcctgaagtgaaaaatgggtatctgaaaggaagggaacttggggaggtgagaaggctagcctgggcttcgaaaggtctaacaggtactggccttcagggactgagggagcctggaggccatgggctttggtatgcaatcccaggtgcatgtcaatggtcccttcctccagagctaagggagggctccttggcagatgggaactgggttcacaaggtcatttcaaatgacttctgccttagtcactcttctgttgctgtgaaaagaaagcttttaaatggggcttgcttacagtttcagtgagtgccttgtcatcatggtgggaaacctggtggcaggcaggctgggtgctggagaaggactaagagtgccctcaagatccacaggtaggagagagggagagagagagagagagaagagagagagagagagagagagagagagagagagagagagagagagagagaatgactctgggcttatcatacatggattttgaaacctcaaagtctatccccagtgacacactttctccaacaaggtcatatctcctaatccttttaatcctttcaaatagtgccactccttggtgacatccaaataaaggagcctctgaggtctttttatttaaagcaccacactggcttttatctaatcacctatagtccatttgaactcatttctggatatatggactgcctgagatctgacaggcagcaagtatttttacacccagagccttctcatagtcctggataggttactgtcctggtcggtgtgtgatgtggaaactcaggttttcatataagtagcctagactggatcctacctatgcccataaataaggcaagcttgtgcataggttttattgtgttcaggtgtttctttgttagaaaatacagataataaggacagttgtctagtgggttgtggaaaacagagaaagtatgcttggcagagaacctgcctgtgcaaggctgcccgtgtttcaaccgactgcactgtctatggcagccatgacctcgtgtgattgctctgtgtgaccaaactgacttaaagaacaggtttccataaggttggagtccagaatagcaggacagactgcagcaagcaggcatagtagctggagcagagtgctgagagttcacatgctgaactgaaaacacatcatagagaacaagctagaaatgctattaaatctttaagctttcaaagtctaccaaacttcctccatctagggcacatctgccaaacctcctcaagcagtatcattaacaggggaccaagtgttcaaactcaggagcctacaaccaacattctcactcaaagcacttgattctcctccctgacccacagaggctcagggtcatatcacacagggcaatgaccatgatgttggtcttcccctgcggctagtatgtgcatatgaagagtcaatgaatggaaagtgctggaaactgtgagtcacacaaagcactctgttcaggtgtatgctgcctgaaatatattgcaatagaagtagaaggaggaggtgaagcagacatcaagacaatgtatagggtattttcagtgcctaataaatgatggctcacttctttatctattacattacatctgtgtataagatggctgtggctgagaaaagaggttggggggaaagagaggaggcaaagagagagggatgaagagagggaggaaaatgaaagagaaagagaatacattcccaaataacataaacagtataatttttgggacaaagtacatagaaaaattaaaattaatcaggcagtggaggggtattcttgccactatatctgcattcaaaagaattcttggttatgtttgtttagtgttttacttaggggattgactttgctaggttttgttttattttcaattgagattgttaaatgttttttagtttggctggttagttgttgtttggttggtttggttggttttgctgttgttgggtctttgttgtggttgttgttgtctgagccagggtcttattatagtgagttctatgacatccagggctccatagtgagacaaggtaatcctggaaattgttggccagtatgactcagtcagtgagagaccttatctcaaaaaataaggggggaagcaatagagaagacacctgagatcaacttctgaccttagtactcaagcaagcacacctgcacacacacacacacacacacaaatattatccataaaataataaacaacaaacaagcaaccatttacctgtcatatgaggatgcaggccatgtaaaggaagggattaatttcctgcaggccctgaggggaaaatgagccctggaagcctttaagaaaggagtgaattttcagataaaaaaactgcctgtgccaggcttctgagtcagggcctcttagtgagacagcagaggggctttgactgatgggtggactgtggtgggagatgaggttagaaaggtggagggacagcctggcaggactttacagagcctgggaaacattctctcttgtactaagtaagacaggaagcaattaaagtgttcagaatagaagcacagtacgatctgtggctcatcttaaggggttactctaggccctgaaacatattaagagtttgttgcagtatctgggttgaaaagcaatggctgctggaagcacatcaggcatgataagagttgagaagaagtgtggctgtatgtctaagacagagccagcaggagtgcctaggcattagaggtagagtgtcaaaagtgcagaattaagacgctctcaaaatgtgtggcctggggatccatgactgccatttgctgagttggagaatatccctggtgaatcatgttgattcatgtccggaaatgggagatgtaggattaggaatttcatttgaataagagtttgagctgcctattagaaattcaagtgttgatgtcatgtagacatcaagaaaagtaagctggcattcatgggcaaagtccagctggaagtcaacctttgaacagctaaggctacttaagattaagtggaaagaaacatcaaggagagcataaagaagcacagacgctggggctgagcggtcatgctcttcgacatccgggagtcaggcagataaaacagctggcaagagagacagaggtagtgtccagtgagagagaagacacatgaggggagtagcttcaacaagcaaatcaaataggaagtcaagtgggagacagaacttacctatgccagtgttgcagggaattaagcaagtgtggtctgattgttgatatgtgagagtggcaaggtcattggcagtttttcatccatcagtcacctgatattaaagtgatgccatgggaaaaaaaacagcaagatcctaatctgtagtgtttaccaatttccataatgtcaacatacacatcacagtagatttcaagttaccactgactggtacagccttgaaacattcagcagttggctctcatacactctcatacataccaacagcacacaaactggaaacccttggtaagctgctttggtgaacagtgggcattgaatagaaagaggaggacagggcaggggtggttagctctctgcctgtgtgtacaagcctggcattcactcccaagcatgaaatgaccacgactacaaaagtaaagttttggaggcaatgagtagaggtattgttaaggagttacttgctaaagaaatgaagtagcaactgaataaagaggtatggtcctgagatttttttttttataagagaatccaggtgtggtagcacatacttggaattccagtacttgtgaagctgaaacaagggggttggcatgaatttgagggcagcttgagctgcagagtgaaatcttgtctccaaaaataacgaaggaacagataaacaaatacagacacagtattgtgtttatgtgcaggacataatgatacttttacaagatgaaggatgagaaaatggtgagacttgctcctggaatgtaagaggaaggagtttgaatgcacaaggagagatgttaaggcctcaggtaccagcccagagtagaactacacactgcaatagaaatatagtgggagcaacagacgtaatcgacctctgtcttatttttctttgagaaaggtctctctagcccagtctgatgttaaactctgtgtagctatgacagtcagttttaacagtcagtttgacacaacgcagagtcacttgggaagacagtctcagtgagggattgtctggatcaagctggcctgtggacctgtctatggagggtattctagattatattaattgatatgggaagacccaagtccaccatgggtgacacgattccctgggctctgggttctggactgtatgagagtagagaaagtgagctaaacactagtatcatgcatatattcatatctctctgcaaatcttgactttggatgtgatgtgaccagttgtttcaagattgattataatctagagttgtgagctaaaataaaccatttctctccaaagatgctttttgtcagggcattttctcacagtaacagaaagaaaatcagtacagaacccaaggatgactttgaatttcttcatgcatctccaagtattatgattataggcatatgccaccacaactagctgcaacatatgttatttgaatttgttagcaattgcattaagagatcagtgactaaaggtacttatcaccaagatgatgaccagagttcaatccctggaacccatatatagaaaaagagagagctgatctcccaaatttttctctgacctctccacgcacacagtagtagtgcgccctccctacatacacacagaaatcaataaataaatgtaatactttttaaaaattaaaagcagggaattaatttatttacttaaccctctacatatagtttcttattaaaacacatagtgactacaaagcatgaagtaataggagattccatgttcgtcttcttattcagttttcaaaacctactattttcttcacaaaacacgtttctccttaggctagatcaatttccggtattctctatcatcaactgctaaagtgaaaaaaacaggcatcaccagtgtttcagccaagtgtgttggcagaaggctataggaggatccatgtctcttattttcttagtgaagcaggagtcaagttcaccaggcaacagagagcaagattggatgagaagatgctggaggcttaaggagagaaggaacgatgagaggtagttacagggcagaagaatgtgccaggcttggtgtaggaccaatgtccactgcagtaaatggtcagaagttaaaatgagactgaccattccaggtgtgtgttcttctttgagctctgtcatgacagggacagaggtatgtctgcaaggacctgcagtatggacaaagctgggtttgaatatgatgagattggtcaaaagactgtttccaataaaaacaaaacaaaaccaagaacaatggaaagccccattctcctggagggagtgtgggtttgtccctttcttacctcagttttctggaactttgttgggagcaagtatgagatgctaagtgaaggatttagggattctgtaaaatgctatcaaccttgtttctttagtcgctactcctattttagaagttcacttttagcaggttctgtcaactccttctcccaggtcactatgctaagctgtgttctgtgccctttctctttcctcacaagtcatacactgattaattactttggcatggtctgattgtgatacataaaatgggtgtacagcactgactccccacgtggtaaagcctagatgttaatgaaggctttctgctctctgcctgtaacctgaagctgccagtcaacagaacaaatcagaggctttccagccacacactgaggtctttatgttaggaggatcacacgaggtttttgtctgcaaaattcctctctgtgtaattattcttttgatcaggctacacttgaaaagaaaagagactgggtataaatcatgtccttgtttcactggagttaaaaaatgagacaggacgggagtctgtgaaggtggtggtctgagggcggcagttctgtgtgtttaatagacagcttctgggcatttccacgagtgtcctcagggcaggtgatggatatcatgttggtcaacccatatgaaaagccacagccttatacttgtccttatagaaaactcaatcagaacttactcctatgttcttgtgggcaaagctcattgtttcccatcaaataattcaggcacatttccctctatttgaactttcaaatgcagggatttacatgaaattctgagtgttaaacccatactgtgcttaggatcacttttggaattaacagctcacagagggacttcaaaatatttttatgtttcttttatatttattctttaacaatctttatatgtgtataatacatttgatcatattcacccctattaccctctcttattccctcacaccaacttaaccttttcttcccaggaggtagaggtgtgtgtgtgtgtgtgtgtgtgtgtgtgtgtgtgtgtgagagagagagagagagacccaagtttaattagggttgcttgcatgagaagcagtgtgagttcacttaatggaatatgagcaacttaccatggcttcaacactaaagaaaatgattccattccacttagtagccattaactactaatatctcctcaactagggatgaggatctaatgaacccttctcccatctatgctataatatagatgagtctaatcttgtatgggtcttatacatgtaaccacagatgcttgagttcataagtgcaatgtccctgtcaagtccagaagacggcatttcacagtatccttcccatccctgggctcttaaatagtttccactaccttttccacaacattccctgaaccttggacaggatgatatcgatgtcccggttaggactgagcagttacgagtctctgcattaactataacccattgtaaaatgagttttctcttaccaaggctaagagcagtgctaacctatggctataacgtaagtagctagaaggcagtttggcaaacatcagtggtagatccctcaaaaggagactttgtaacagcatttgagaggtagaatatatgtcttctctgctctgtgacaccctagacagcatcaatcactcaatgctgagtttccatgtttttgtatatgatgttctctgacattctgactttaacatctttctagtcacaccactttaaaacaagtatacacccaaggactgcccaaacttaccctgtgcaagcatcatagattgtgcttctgtaaaccgaatgggacaggatgtcaccttctgggaccctgttatatatgccagccaatgttgatcaaactacattatggtactcagatattcaagacaaaacaaatatctgttgaggaagtgaagaagatgctgtgcacaagaagtggccttccatgaacttattatccttcttatgactctctatccttgctttaaggtttattttatttattttattttatttctttatatggctttacctttgggtctctttcatgaatctggagacttctccagtacagaggccatgtttgttgtaccttccaggatgtatagtaccaccaggtgcatgataagctcttataacttcactaaccatgaaatgccaaaaattgagtatcatagtgagttcagttgaagacagaaacagtctaagtgaggccacagtgttatagacctactaatgccaaaatcagctcacaactaatgtgtactgataactctttccaccagctgcctgggttctgttgcagctttagggcccccaaataacacacagagtcttatattagttacaatgctgctagccaatgactaggatttcttatttgctagctcagtcttaattatcaaccataactactaatcaatatatttttaaaaggacttgtcttaccgaggacaccagtcttatgtgtcctctcttcctgggatcacatggtgactctctcccttccctacatttcccagaatcctccttctctcctaaacttgcttccctaagacaaccatatacacagaaggacctcccccatcactaatgtgatccattccaaatgcaacttcagtgtgagcttacataatggaagtaaccttcaacccgttacactcaggaatcacactaaaaataaccaaagagttaattcacagatcacttcactgtgaggattttaggggtcaaaaagttttgcttatagtctgcatacttttggggaaaaacttactagttctggagctccttaaatttagtatggggggcggcatttgctgtttgttttgttcttataaattctttaggaaattcacttggtcttttgagagattctttgaataattttgcatgtcaaaggaatattggatttgttgttgctcagttctgtcaacctcttgttatgataatgttcattcaccattcctaaagtggagtatgaatgtgttgatgatctgacatgctagctggcattttaagataagtatgttatgcctcagttagatgaatagatgtttgtcatgtgttgtatacaacttacttctttcccttgactgtattgccaagcaataagcatttgacagaggaagggagacggggagggaaggtggtgaggcaggtgaatagtggatagacaatggatagatggatggaaggatgcatgtatgcatggatacatggatgcatggagcatggatggacagatagatgcatggatagatggatggatggataggatgcttgataaatgaacaaatgcaatgaatagttcagtggcctgcatgctttgagtgttctagtgatgagttcaagttgtaggtttttctgcctgctaactctctggggtatagtaaattattaacaaaatcaatttctgtttcttcaatgtgtacttcttcagtgtgtagttcttcagtgtatagggttgtaacgatgaaagaacacatgcaaagaatgttgccttaagactggtacatagtaaggtctcactatgttagctgttattttcactgttgaagtaaccacgagtggctgtaactatagaacttgctaatgggtatactgatggttggaccttggggaaaatcagtatttttccattattatagctcaaggctttctatccacatgtatatggcaagtctcacaaccagggacagttacctctggacagtattgaaagaatcagatttgacatctttacacttcagcataaaacacatggctgtggcagcataagatgccatttctctgtgaagtttaaaatgtttataattcccaagtaagtacccttcaagcagacatgttttctccaaggtgacaactccagtacctggatggagcagtaggcagcacaactctcactattagttctagaattctcggccaaggagccagcacaaaatctaagcaaagggacaaggcacctgcaggctgctttggctcagttttccagaaaaatcaaacagaggaaggacttagtggagacttttagaggcccttcctgcttcccaagtggctagcagctgggccttgcttcggctgacagcccaaaagagatctgaggtgcacagctggggtctgccctatggcaataccaatggcattgaacttgagtcctgcctcctgagccctggaaaaccatagctcgactgcttaggctggaagccttggcctttccagaagcttggaccccctccaattagcccctccccactactgcccattgccttcccattggccggctggctgctcaactctgagacagttcacaatttaaatatgtcttcttttgtcagcttgatattttccagaattgagaagcggaaaagcagagaggagtacaaggaagctattaaggatacattaaacaaactctactgagagccagtgtgtgttgaagagaggatctgagactcctacaatcggcatttcgggtttagctagttagtctaacacagagggccagtctgtggctgtgtgtaagactatgtttgtgtgactgtgtgtgagtgtatgtgtatgtatatgactgtgtatgtgtctatgtgtttgtgactgtgtgtgtgagaatgtgtttgtgtgtgcatggctgtgactgtgtctatgagtatgtatgaccgtatatatgtgtaactgtgtgtatgtgtatatgtctgtgtgtgtgactatgtttgtgtgactgtgtctgagtctgtgtatgactgtgtgtgtgctgtatgtgtttgtgtctgtttatatgtgactgtgtgtctgtgtgtgtatatctatgtgtgtgtctgtttgtatgtctgtctgtgactgtgtatttgtgtctatatccatgtgtgtctctctgtatgtgactgtgtctctgtatgtgactgtgtatgtatctgtatatgtgtatgtgtctatatgtatgtatgttactgtacatgtctctgtatgtgacagtttgtatgtatgtatgtatgtgactgtgtgtgtgtgtgtgtgtgtgtgtgtgtgtttatctatatgtgactgagtatttgtgtctatatctatgtgtgtctctctgtatgtaactgtgtatttctctctgtatgtgactgtgtatgtgtctatatgtgtctgtctgtgtgtatgtatgtatgcatgtgactgtgtgtctctttctgtatgtgacagtctgtctgtatgtatgtatatatgtgattgtgtatctgtctgtctgtatgtgactgtgaatttatgtctatatctatgtgtctctctgtatgtgactgtgtgtgtctctctctgtatataactgtgtgtgtctgtctatctgtatgtatgtgactgtaaatctgtgtgtgtgtgtgtgtgtgtgtgtgtgtgtaagtatgtatgtgtttgtgtatctgtgcatatgtcactgagctgcagaagcagataactaatggaactaaacacaaagcagctctgacacacagtgaaagggcagctgactgaattcctaagttaaaagttcctgccagtaattcagtcaaccctgagctacataaaagaaaaatttaaaacaacatagaattgaagtttaaccacccaacctttaaatgtgcagccagagtaggcaggcacacgtagagcgggctgaagtacgagaccagatcctgactcttggtggatagaagaatccccctagcctttcttcctctcactttctctttggccacccctgtgccagaaacagctttctgtctgtttacgttaaagccttggtgctgactttcttcttcctccttgaagctgttttgtgagcaggtgcagatggctctcatgatctgagtgtgtggagactcttcagcttacagagactaaagttgtaggaaagcaatgaccatactttgagcggtacctgtaaggcagctggaaaacatttgccccattttacaatgaaatctgccacttctgtttctttcttttaatggttttggtttgtttatggccttaagcaaatcttgtcactaaaatccaccctggccactcctccagtgtttttcagtctggtgatttcacaaccagacccattgcaaaacaagggtatgggcactttaaaatctctggagattttgaagactctttaaatattttcctttcttgtttttcactgtccacaagtaaagagctgcagggggattcaaagttgtgggactgccgaacatttccataagcaaaatatgaaataaaccacttgaatttttaaaaattaatgtgtgtaagagagaggagagagagggagaagaaaggagagagagaaggaggaaaaagaagagagagaagagacagaacagagaaaggatagagaaagaagagaggaaatagagaagagaggatagagagagaaaagaaagaggaaaaagagaaagagaagagagagatggggtacacacatgcatgccccaatatgtatacaaaagtcagacaactttgtggagtctgttctcttcttccaccttccagggactgaactcactttccaagtttacaccattactccagcctgctatagactgcgtttaagtcttattattttaaatcaagcaatagaaagtggagaacctggtgctcttggttctctgctcagacaatacccacccaggcaccactgtaaagccataaactagggaacccaaaccaaaagtcagaataccactaatctgccagactctgaactgaacaaaacccaagtattacttactatacctgaaccaagaatatatccaaaaatagatcaaaggaattggctcaaaacagcaggatatttgtgtatgttctaaagtcatagaacgtaaaattagaatttaaacaaattccacaaacccattctaaaagcaaccaaggggcccaactgacttgatccagtggcttttctgagatccagcaggatgtaaagggtttggattatgctgctacatggacctttcctggtggtgtctttctgagggacacggactcagtcagccagtgataacagaatacctgctgtgttttcttatgctcgtactgaggacattttgaagtaggtgactcttgtacatatgatgtttcatggtgtctctggcctccaccaagaattagcatatcatcttctctgctccagtgagagccctcaaacaatgtctgcaaatgtctctttcagggaaggggtggggtgacccatgttgggaaccactgtagagggagaatggtcataagcccccacactgtttccagggtttcccagtagatgatggaaagggaagccatatacttatctgcttagaaggaccacctagtagacaataaaatacagttgccgaaagtcagcctttcagagtaggttggctggctaaagcaagacaccctttgtgtcaaaccaacaatgagtggtacttgtgggccacagacttgatgaaactacagagaatatttgaaaccatttggcgaatctgtacttcatagcaaccttacatcttaaagattaaagattccagggtcttttgaccacactacattcagtgtttaccttcaccgtctgaaagatttacacaaataaatatctcaacatataaagtctaacagtgtttctagctcgctgcctgcataccctacagtgacttattatatattagtgtgctattttaggagcgttagacatcttaattataacttttttcaaagtttgtgtatatatagtgtatgctcttgaaatggaatttatacttactctgagattttccacttttatataatataatagtcccctttcatgggcagttttcatttggaggaagactcatttgagcaccagagaattgtttagaacagtaggtctagccaagattataatgtggtaattgcacttaaaattgagccatgccaaagcattgcaaaaatactacgaactccactggatctataaccctgacacagacagctcatcagctttccctaatgctgtgaaaaacaaaccatatttgctattttttgtgtctgtgaggaaaacccagggagagagtaatcacagcagaaaactaagcagcagatttggtttccaaatgttgatttaatggtgactcagcgtcatcatttttgcttggtttctgtccttgagtgcaagttacaaacccaagtgctatatagcaatacaaaatgttgttggttaaaattccctcatagactgtgacccatgaagacagccatgaagtctgggaggagaaacagtctcttgatctcagctgagccctccaatcactgctcaaaatcaacagtttgcctgctttaccaatgacgaaagcacagtacaaggtgcttggagggctatgtggtggtgcaggccctcaggggagtgtgttggtgttcccattgggttcaataccttcaatgcagaactttggagttcaatcccagtgctgcagaattccagggttcaatcccagtgctgtagaattttggggttcaatcattgcactgcaggactttgggtagagaagtgcaaacagatatctcttcactccagatagaagacattgatgacttagcacagaaagcattccaccaaaccctgcttgggtgactcagaggcagctgcatctctgaaaagcctactccagtgcgtgctgactcacaagggcttcattcttggtgctccctgcacaacttgcaggcagctcctctgaaaaagttctccttatccagaatgattggtggtggtggtggtggtggtggtggtggtggtgtgtgtgtgtgtgtgtgtgtgtgcgcgcgcgcgcgcgcgtgtgcctgtctgtctgtgtgtctctgtactccagaggaaaggccacatgtcactgtgcctctttagctttgcagctttccatgttttcctgggcctcacatgctctcaggaggggtcatttagttttgaggatgaagctacacaaagaaaagaaaaagggaaaagttaaaaagatagtccactggggttggaggacaagacagagagtgatacatcggaacgtgttgaaacttacccacaaactatcactgtcctccattccactagataacatgactatgtttcctcagggagattgctgcctttattctgttcctgtgtagtaaaacacagactccacagggaaatgctaagtggacagttagtagccctaaacagtagccctaaaattctgatctgggattacttcctccttgtgtcctgttgcttgaatttagaaacataaattcaagatgtattcatttccatttgtgatacataaactacaaaccacaaagaagggtaatattccagtcatattccattctgactttttaaaattaatttttatttaaattaaaacaatattattttacatataaatcccagttccctctccctcccacccttccatttcccccacaaactccccatcccatccccatccactcctcagggagagtgaggcctcccatggggaatcatcaaagtcagtcacatcatttgggtcaggaccttgccccaccccggtctatctaggctgaaagagtatccctctatagggaatgggctcccgaagtccattcatgtactagagataaatactggttccactgccagaggccccatggaccacccaggcctcccaactgacacccatattcagggggcctggttcagtcttatgctggttccccagctgtcagtctagagtcaggaagctcccacttgctcaggtcagctgtttctgtgggtttctacagcctggtcttgacccctttgcccatcactcctccctctctgcaactggattgcaggaattcagctcatcagctcctggatgaaggctctaagatggcatataaggtagtcaccagtctcattattggggaagggcatttaaggtagtctctccattattgcttggattcttagttggggtcatccttgtagatccctggagatttcccgagtgccagatttctcgttaaattcacaatggctccctctactgaggtatctctttgcttgctctccctcactcaaccctcccattccctcatgttctcctcctcctgcctcttcccnnnnnnnnnnnnnnnnnnnnnnnnnnnnnnnnnnnnnnnnnnnnnnnnnnnnnnnnnnntccatttctgcttctggggaaacctaaactctgaaagttcctgatcctgtatcagaaatctttcctgtcaattcctgaagcaattgagctctgagaaatgatggcaccagcagcagtagctccacctccaccaccaccatcaccaccagcagtaccaccacctccacctccaccacctccatcatcaccttcaccaccatcacaaccacagcattaaccatctccaataggacctattagtttttcctgccatatcttcctggaaatcactcaggaagagaatgggccttggatcttttttgcctccttccaagtagcaaaccattcaaattccatgtttctgccagccagctaacaaaccagacagcatttattttgtggcagccacatgcattaagatgtgccacaccattgggcccagtgagttgactccgtgctgtatgttaacggatttgtatcttgttgtctcagcaggtgctgcttgcctcatcaaggagtcttttctttggttcaatcctggagacagtcttgactttttttttttttttttttttttttttgttttttnnnnnnnnnnnnnnnnnnnnnnnnnnnnnnnnnnnnnnnnnnnnnnnnnnnnnnnnnnnnnnnnnnnnnnnnnnnnnnnnnnnnnnnnnnnnnnnnnnnnnnnnnnnnnnnnnnnnnnnnnnnnnnnnnnnnnnnnnnnnnnnnnnnnnnnnnnnnnnnnnnnnnnnnnnnnnnnnnnnnnnnnnnnnnnnnnnnnnnnnnnnnnnnnnnnnnnnnnnnnnnnnnnnnnnnnnnnnnnnnnnnnnnnnnnnnnnnnnnnnnnnnnnnnnnnnnnnnnnnnnnnnnnnnnnnnnnnnnnnnnnnnnnnnnnnnnnnnnnnnnnnnnnnnnnnnnnnnnnnnnnnnnnnnnnnnnnnnnnnnnnnnnnnnnnnnnnnnnnnnnnnnnnnnnnnnnnnnnnnnnnnnnnnnnnnnnnnnnnnnnnnnnnnnnnnnnnnnnnnnnnnnnnnnnnnnnnnnnnnnnnnnnnnnnnnnnnnnnnnnnnnnnnnnnnnnnnnnnnnnnnnnnnnnnnnnnnnnnnnnnnnnnnnnnnnnnnnnnnnnnnnnnnnnnnnnnnnnnnnnnnnnnnnnnnnnnnnnnnnnnnnnnnnnnnnnnnnnnnnnnnnnnnnnnnnnnnnnnnnnnnnnnnnnnnnnnnnnnnnnnnnnnnnnnnnnnnnnnnnnnnnnnnnnntttcgagacagggtttctctgtggctttggaggctgtcctggaactagctcttgtaaatcaggctggtctcgaactcacagaaatccgcctgcctctgcctcccaagtgctaggattaaaggcgtgcgccatcaacgcccggccagtcttgacatttttaactagaactttgaccaaaacatattttcattttctgttttctcaagactcctgcaaccaaagcagatgcttatttaactggtttagataataactccttttaaagttgccctttacaaattctttttgttcagttctctttcttcaaagtgattccacgcactgttctcagctgatgacttgataaacttacctccccgtgtgaacacattcctgcctgaacaatccttcctaccagacacatgttaagttcacacacttgttacctaattcttctagcaaccttctgatcatgaataataacacactctcctgtagacatcaagtctctaacagttctgtctgcagaaacattagctacagaaccttagagggaaggggagggtgggaaccatggggaggggtgggaaccatgggagggtgggaaccatgggaggggtggaaaccatgggaagggtgggaatcatggggaggatgggaaccatggagaaggatgggaatcaccaatccaggagttgaactgagccttctttgtgaaaacgtttggagtagtgatactcacagtggtcatgggaaagccaccacagggacagcagtgagttttcatttgaaattgggttctttttctctggcctcacaaattgtttccagaggttagccacttacagaaaaaataaatctcacacttggaagtaaagaatgtgttatttgacttgaaacataacacatgtattccatggctcggtttgttctgtgtcggatgtctgaatgttgttccatgcctatatgtgaccccttcacagaggtcacatgtgaggtggtctagcatgagacacttaactcacagcctagcagggtattaatgaaaaccccggctaagctactacagttctgtattaattgcttgtgcccagagcttggtgcctcagttctaattctctttagaacattggtggcatgatacatgcgaaagctcttatgttactttaaccacttaggcactaatttggtggcatggaaagcatcagactgagtctttatgagcagaacaaagtggaatattgagcaattttccaaattttatcaatatagtgagtgaactcagttgatgttgctagctacaacagatgtttgagttcttgggtcaccatttaaacaaaaatgtttcttgaaatagccattggcttaacagtttcttttcattgcagtattaagcattctaagtattgagcaaagcataaaccatggaaatctatgagctgtgaagaaactatacatgctgtaaaggagtgtttcattttccagatatgttgtatgcacaggcacattcaacacatgattcttttaccaatgaagtgatgaattgcttcatcttgccatcatttacttgatctgtcaggaaaatttcacatggctattaggtgtgtgtgtgtgtgtgtgtgtgtgtgtgtgtgtgtgtgtgtgagcgcgcgcatgcgcgcgcactcaagcacatgtgtgcacgtttcttcttatttatttaaatcccctttaaatagttagacactctgtcctgcaagtaatgtctgaaccactctctttagtctaatcttgatattctgttttaaatttctcattggaagtttgaggcttttctgccctgttgctgttctgttccgtaggtttggtttgaagccacccatggcacaactaacagatgacctttgtgaaagtcctatggaaacttctgttgattgagaaaaaaggagaaaatgggttgtttactatgcaccagggaagatggctctgctcacaagaagctgacagcttaattagggagaggaaactcatgtgaaataattatcaaaacgaagtgtatgtgtggtgcaggctgtcagagccaaggataataaggtgttaattgtctgggttaggccatgagtctcaaaggacttcaggaaggtagagatcaacatgggctgaggtcatccaggaagactttccaaataaaaggatggtttttataagcctcttctattctcaaagcatttcaaaggctagagaggagtggatcagaaatgagactcacaggatgaggagaaggagagccaaggagagaaggtaacagcctacaaaatacagacatcggtggggagggaggggccagagagagtctcggctcagggcatcagctcaccactgctgctcttctggtgcagatatgccagtttacgtttcttgaaattcattttgacccatgcttactctgaaagatgtcagcatccagtttggaggtttcagagagggagggaaagggagaaggaagtggtgctgttcttcaggatttggggagataatcaagcagaaatgacagacggaacttacttccttttcttgcaaggtaaaacacacaagtaagacctgggtccctacacatgctaaagagtgtgtactctatgtggagctatccctgtggcatgcaagctgtttctggaaaagatggtaaccaagctcaaaatgctatctgccatccatagggttacttacttctctttgggttttgtaaaaaatatctcaagtggttccacttggaagccactttgttctgttttgaaatatcatgttttaaagtggagcgtatccattgttccttctgaattccatgtgtgcttgtctgcaatcaaaatctcctgctatggaaactaagaatcaataccttttggttcagagactcaaaaaatcccccgacacttttatttatcaggaagaaagaatgtgtaagagaaatgtttattttacagataataggacttcaggtttaaaatgatagctattatcattgaagtctggtgtgttttctgccccctctatgatttcacttttaagataacataacctctcacatcttttattttgtcaaggcagcagctagtgaaggatccacaggcttttatgggggtttgggaaacaggattgttcttgctgtactgacatttctttcatccagggttatgctaagtgtctaatgaagaaattgtaccatgcagaacatgccaatggcacccaagattttgacagaaagaaaccccatttctactaaggcaagagagctttgcctccatcaggaattctaaagtacctttgagtgtgataactcctgtcgcttctcctagtgccccagcactgcagcagcgaaaggacactcgcctaacttacacaatgctactaagaagagcattcttttcttgcagaaggagggaagggtttctctggtaggggaggggtggaaaccatgggaagggtgggaatcatggggaggatgggaaccactctctgaagcacatctgcagcctgcagcatagccatgataggtaacaaggtgggttgcttcattatcgaatactagaaaagatttgaaatgtctcttgggttttgtgaaaagtatgcttttttaattcatatgcattcctggttgaaaacaacacgataaagaaagctgtcattttccttagaacacagaaatttagaagaaattgaacaatgagtaggggatcacccaaaccaacctccttaactttgcaaacaagaagttaagcaaagggaagcaacttttgtctcaggttacacagaagttactagagagaggggagcaggtctacaaacctgatatccttatgtagtccgaaggacagatggaagaaggaagtccttgtagggcaagggtcagcaaacttgtgtacaaagagccagattccaaatatgctggaatatagatatagatatagatatatattatctgaatgattcatgtgtacccttaaagtcacagaacagccacagataatgtgtaaacaaaagaatatgtcagtgttactacgttaaaactttatttacaaaactgttgataggccaggtttgtgatgacctttcctccagatctaaaggagaaaatgagggcagatatcttggggagctttatgagcaaccttccaaatttgatctgtcatagagaatgccagcttctcatggctctgggaggtactgttagataaattgctctgactcaggcaaaactgactctttttatagctttcccaagaaaaggttgttcaggagggatttcaagtattgaagagtcattcttcaggattgtcctcctgtcactcttgttctagttacatatgtaagagttacgtttccgtatacctccgggacactgacacttactatagagacatcctgtgaccactgttattattaactgctgtttggctttaaaatctgaatatggaccactgtttccagaaatgattcaagaactctgtggctgaacagcagttaagaaatggaaagaaatgaaagacttcctaaatgtatataactgtgcaaaattgttcgtagaccataaaaacggttttacagttttttttaaagttttcaagcatatgtatgcaggtgtggggggtatggaagtatgtatgtgtgagtgtatggtctgtgagtatgtatggtatgtaagtgtgaggcagtgggggggtggtatgtgggtgtgtgaggtatgtaaatacacgtggaaggtggtgtcagtgtgtgtttgtgtgtgtgtgtgtgtgtgtgtgtggtatgtgagagagacagagagagacagagacagagacagaggaaaagagagacagggaagaagagataacttcataaggcaagtctaaggacatgccctgtggcagtagctgccctagaatgaagagctcgctgctcactacaaatgcatgctgggataggtttggtacctgagggatgagaatgcagaagttagagccgtgcaattttagtaaagcaaatctgcgacacagcatcctattcctccactcatgccgttgtttaaaaatggccctttagtaaccacatagtgtttgctggtctcaagccagaaacaagactaaatgtagtaaagaaagttagcagagagggaagacagtgctgattgaagcaagggattgggagaggtgggagatctaattttgcacgctcacccaccatcactgcaaggtcacacatctggctccctgctcctcttcctcatcactctatgctctgctccttgcttccctcctttgctagataccacacgacaggtaagaagacatcatgatctagaagaaaacaacctagttcttgcctatgccctgcttaatttctcctgtgccgagctgttattaggcagggaaagcctgtgaacattaacctccctgcccccatcaacattgctctggtgaaaactgtttctctctctgggaaaatttctggagagtatttgagtgaaaaggtgttaaataatttctgtaagtgggaactagccgcagcaaagctcccctctttaccatcttgctagtctctggaacaaattcagtggaatgtcctgcttagttctcaagctcgtttgctttaggcgtcaatgctgctcttccttctggctttgccttacagattggtgtaagtgttttcactgaagagatggcagcatccactccactgaagaggcagataattaaaagcttagtatatgtcttctgctaggcacctgtttgtgtgctgagttctgttaatgctcacagtttcaacttcaaataggaagactgatttctcccttgttgacatcaattcccaggtgttattctgaagggcataaaacacagatgacttgatctgagctgtaattctggtgtttcagtagcatgaggcagcattctggcttctatatctaccagtccaggcccttccttcactactgcctagcttccacataggaatcaggccctctcataggaccacaggccattgagaagctgcccccaccacaaggctcttttccctcttggaatttttgtagtacttttggtttatgccaaaaatttcctcacttaattatatgttatcttggatctctctcaagtggtttagagtgtactgttaagcacataatccacacagccttttgaagagaaagctcatgggtcatggccagcaagctatgtgatatttaagagaagactgtgagcacccacaggcaaggaagtgctaaggttaaatcctggcctttagactctcgaacacagcggccagagtgttgctccatcaagcaggctcacaagggtcccagtccatcagttctcattagcagatgtggttgttcagtgtcacaagacaccatgccctcaggctaccacttcacatgtcttcaggtcagctacatgtagccattgcagccactagcacttggaaagccttgggtcacgtattcaaagaatgagaacctaagggtacacctgccacggcactgggtgggctgcatgccaccaagggagggagtggactgtgaatagtacttcctaaaacgcttgctatcccagctggcattattgttctgtcactccctgtgatctcatgagtaaccaactttctcctcaagtgtcacgatttttatttcatggtttaaaatatacttgactagttgctggtttggtcttatttttagttggtgtgtttctgtgcacgagtacatgtgactgtgaatgtatatgcagatgtgtatacatgtgtgtgtctgtgtgtaggccacaggtcaatattgggtctatattgggtatcttcctcatttgctctccatttactttttgagacagagtctctcactaacgtggaactcattgtttctactagatcatctagccagagaactccagaaatcagcctgtttctgcttaccaaatctggtgttacagcacaccactcactgtgcttagccttttatgtgggtgctgaatatttgaactcaggtccttgtgcttgcacagcaagcacttagcaactgagccatatccctaggccctcccagttgattttctttttaaaatatctgcccctgtatagcttgtatatcatctcacatctatctttccttaggctttgtgtacttatgagagttgccttcctttgccttcctcagcgttgagtgatgaattacccctgcaactctggtgtaatgtccttaatgagatactctccacattatctgctccatattccagaaatcaacgtcaacgtatttgacactgaccattttccagtgttattaaagttaggaactgaaagataaagaagaaagagtccctttccttgggaacttaatatttacaaggatggtgtttaaaacaagtacaatcaagtgttttggatgctatcaatggggcactgaaggcaaaagaaagaaaaaacagatttgatctgggagttggtaagatttctcatgcagagaggtacataatagttaaattcccaatatttatattgtttggcttatatgttatcttaagtaacagctgaaatcaggaaaacattggtttctttttcaaccatgtctactgatttattgaattcccatgccctgtctgagtttagaacgacacatagctcattatttcctgacttactggacacagttcagtgctcattatctcatatgaccacgagaacattggatgtaaatacagagagaatgtggtaacctacggcaaggcactgggggcacagaggtgaggctttccctagctagacagatgtatatctgttgtgctcgtactgcacacattagtgtcttctcctcttctcatgaggatcacccacaaagaaatgcatagatggaatcacagaaccggaagaagcaggctgtaaatttcctatcagccaaaaaggaatcaacatagtgtgatgtggtttatccttggaaatcagaaagattcagatgcgcctatataatagcctataaaccatttggcatctctacctattcacttacccatctacagtctccatctctgtatagaggaagctatgaagttcatatacaacccactcttcccatgtttcattacttccttttcgaaaattcaaagtaagcatgtaaaccattgaaaaatagggccagcaagacagcttggtgcataaaggaacttcccaccaagcctgattgtcctccaaccttccacatgcatgttccccaccacctccacacaaataaggaaatggaatttaagcatgttttcaagaaagataaaataatatgtgcaatcccttaaaagaccattgaatgaagtacagaatttagattgagaagttgtaccaatatttgagaagaaaaaattttgaaaacacataataatggattttagtgtgtcttttaaaaacccagaagttttgcatagtgttaaagttgtatccatgttctattgaaatcaggacagactattccagactagttatctatctatagtgtcttcatgctgaggtgcctaggattttctttctaaaaatggaactagtaatactcatacttgttttttttattaaacagtccacatttaattaaaattcttttttaaaaagctatttcaattttcaggttattctattggggataacaattctgaaaatgtgctaagtgctgataaaaataacacctgcagcctcaacatggtgcttctccacttaagaaaaggcctctctggttctagaacatcagaattctgtaaatacatgtctgtttctcatgtgacccaccttcctgcctctcatgtgcatctgtgatttttgcagggcagaagattaaatgcaagtagacaccatgtaactggctttctctgcagccgagagtccaccagtggcttcaaaagagaaataagcacctgtaatgattgagaatttctgatgttgagggctgtgttgttgatcctggtcctgggaagaaaggctcgttctgatgtttattcttagtcattttttgaagaaaacatttgtagattggctagtgagttcatctgtatctgtcttcatgtctgtagttagggctcttacagtcaagatggacaggatgacagcagggaggttttatgacaagacacctgatactcatccagccaggtagaccaaggggacaccaagggaccctgggagcccctgaatgtggagggcttcctgaaggagagtagggctattctgcaggaactgacctgagcaaaattaaatagaaaacagccgcatgcctctgcaatctatgtaagatgtggttctagggtgctcctgcgggtgtcttcactgtcaaccttccctcttgctgtccgtgatttcttggtgcttcagaaggaaacagacttttctcctctcctgacttatctgagaaattctggcaccagccaggtttgagatgttttgttcagacattcttaacttgtttagtaagaagtaaaagtctttgttagtttttttttttttcctgcctggagactgctttttctttttgcttcatttaaaccctacactgactaaaaaggtctgtatttctatagcttgccctatgaagctctacctttggaggtatgagaataaagaacttttatttttcaacagaagtcaccggactttcagaaaataattaatacatttaaaaactatcaaagagaactttacaatctaatacatggacatagtcatataaaagagagcctagctcctggggtgcctatatcagcagacttccaaattgcttgtgaatggctagaccatgcccccccccttccccagccagccagcagccgcttcaccacaatggaattcatggtcacactgttaagacctgatgaacacgtgagggtccaggagccaggacctttatgagagttaggcttgtctagtctggtctggcctggtctgatctggtctggcctggtctggtcttgtctggtggaagtgactaagcaagccggtgaaagccttgcttagtgtgagggcttttttagtggccatgatttcttgtccaagaagctgaaatgtccaaatggggggcggggcaagattatgagtggccattccctttcttgctgaacactctgctaattggagcaggaagtcagcgctgcagggctgttctgggaatagctttgcaagtgagggaagcggaaaggcttttgcgttctcctagcctagcagtcagagaagctgtccgatcctgggaatcccgtgtttggcaaaggggaaaagcaacctacattaaagcggtgctagtagataggtaagaaaccaaaaattcaagctgaggattatggacacaggggttcaaggaagctcatgccagtgggaggggccaggccaaaggtgaccagcacggattcctggagaccttcctctcctagttgcctggacaacaaaataataataataatgctttgagaactaagtttttaaagacttcatttgctgaagatgggggatggtgataacaatgcactcttgtgagaggttaaaactaatgataaacgcagccgtgtgcatttctcacatacggcaagctaatgtggacattctgctttatctccacttggccatgaagaaacagagcattcgaaggatgaacatatgtcaaaggtcacacatcactgattctgtgaaatttttttggtacataacgatttgtcaggttcagcctatatcaggtccaccaattaaacttaaattttctttgggtttcccaaatgaatgacacaaactcaatagtttcatgcaattaaaaaaagatttactttatttttaaattatgcatatgtgtgtctatgtgttgcgttcaaagatcccagaggtgttggatcccctgcagccggagggacaggtggttatgaaccacccaacaggatgctgggaatcaaacttggggtcctctgaaagagcagtacatgcatgctcttgattgctaaaccatctttccagccccatctaatgtgattttaatgtttgttttctgctgattttatctgatttttcctcagagggttaatgagagccaggactgtgtctatcattgcattgcagtttctgagattacatgctgtccaatacttcagtaaatgcatttttatgacaaagaaaaggaaggaaggtagatgtcagtcctgaagatagcaagagttagtggattttagccactatgttcaattaggaattgacattgcttgtaaaagatcatatcttaaatatattacatgagattggtaatagattcacttttaattcttgctcagtgaagccttttaatattccttgaaactaaatggaaaattttccaaattactgcttggcagtttggcatgtggggagaaaatcgcttccctctcaagcagcttttccggggaacagattagtgttaattaggggatgttttactgatggaatatttttcttaccattaatgtcactgtccctcttcctaagggtggtattattgacagtgattgctttcacaggcagaaagaccatttcacagaattctagtcatctggcaccctgagacccactaccttttacttaaaagcctaaaactgtcagttttcacattgcttgggaccctacctgttaaaactgtaattaacctcaggccttttcttaagttccgctcaaatcccttctccattataaaaatcacttattaagtaacttttctcacagtaagtatataccaaactgacctgaagcctcatgctgtctggtaagatggcaaaatacaccaagagatgaagcatttgaaatatgactggctaataagcgtttgttaagtatattattgatggaatgagtgaatgacagtgggcacttctgtcacatggaggtggttccagggcacggtttcttggagaccagcttgggttttgtcttaatttcagagattaaagatcgtggatgtaaaaccatgactgccaacagtgagaacactcataatatactgtgtacctgtgttggttctgttgtagatgatgcttaactcccaaattagcatcatgggatagcagcccttgcccatctgattcctgaggtctcagtgaggccatctgctaccataggaaggtttgaatggctggaagctctgcctctacattcacttaggtggcccttggcaggatcctgagcaaatgaacatcctacccactgacagtaagcaaccctggaaagatccatgtcctttttgaccaagtctccctgctggaaaaccattgcccttgctcctgaacaaggggagatgataatgagggggtagtgagtttctaccttttgaaaggagaggcagacaagaatttgtggacattgaaaaatcaagagaatatgtaaatatggaaatttgtttgatatatttgcataaattatctgctattttaaatgattcagtgtttcccagtgttcagtttgtcaataagtgtttttaaacaaagtacttttcctggaaattagcaaaatgtcttccaatatgcatgacgccttctaaaaatgaaacaaaatcaaagcatttaggatcataagaaagaaagaattgttagttgtttaagaaaccatgtaatgacctgattctgtttatttatttttccttttgttcctctgaagttgactcaacaaatttaaatttaaaacaattggctgtatcctccctgtactaaactgaatgtaaatgggtgtagagttttttttaaaaaaaaaaaaaaaaaaaaagacacagcatttatcgcaaagaagcagacagtgcagaggagacaaggacatgcacacagaactgtgtatctgggtcactactttaggctttataagagtaacgggggactgctatgggaacacacacagagagaaaatatctacaaaaggtagaggttgggaagacatcttggggaagcactgtttgaagttcggaagaaggtatccatacaaaagatggcattgtgggagtaaaggtgtagagctgagtagtgtaggtctcctgggggaaccatagtgaaattgggggaaggctacacttctagaatggaaggatacactagagtgttaggaatggcttaaggcccatgctgggtagtagagttagagttttgcatcagtgaggaaagaacagattaatacttaggagtgtataacatgataataacaacagtttacttcctgatcactgtctctaagtatattgcatgtgtcatctgcagtcctcactagtcttaggggtaaaggtgttttaattactgcctcatgggaagcccaggcctttcaactgaaccaattcaccctactgaggattgggatatggcaaatcaaacccagagcaaaacttgatttaagaaaaaaatcaaagaatttaagtttgggtttcttattctttcattcctatctgtaaaccaagctaccatgtaagagaaggtcaataggggaaaatcactttagttgccccctaaacagccatggttagaaaagcttttggaagacagtactactattagctttctaaaggaaggaactatctgggcaaatctgcgcttgtggtccagactgcatatgtctggagaataaacaggtgtatatcagacaagcagttaaacatcctgcctgaagaaacacacacccacaatgaggaaaatgggacacatatggaaagtcacatatgaaagacacatatggaacttaccacaataaccatgatgatacacacatttattatcatgcaaacatgggtattccctgactgggttggcgatgcttccattagttaataacatgaagccacacacagttagtgtagtagtaattaatctgtagctttaagaagatttattttatgtctctgtgtgtgcatctccatgtggggatatatacacatgagtgcagtgtccagagaggccagaaagcatgtcagaactgccataaatgggttctgggaaaagatctgcctcagaagccacaagcacttttggcttctgcatcactcatgtttaatctttgtttctaaagaacccatactgctgttgctataacaaagatttttatgtaacttgctttctgtatgcaagatataaacttctcattgtaaaatattaaaagtaaaatgtgagctggagatttagctgaaaggcaaggtgctttcctagtataaaaaaacgccttgggctcaattacttttatataaaattaaaatatatttttttcataatctacacagcttcagtatactttaaccataggatataaattaaacaaacataaaaataaaaattatttcctgtatttacaggctattttcttaagtctataattttcagcaaaatggaaggtacaatgcaaaaggccactactatgcacaaaacttaaaacaaaaataatttaaatgaagtgaaatgtgagttttttggaaattaatcttatcattgcagaatttttataaaaataagctaataacaaatctagcatgctctattaaattgccattgaggacatacatgtgattaactttaggacacacaggcattgctttaccttgtaaggttttctaccacagcaagcacctcttgggaacatcatgctgccaggatgttcatcctgatctgcagattagaacatggaagcatcgatggagtggatacttgacactgctgaggactggtaccttggctgtcatgctgaaagctaagacttaagaagctaattcatttgcctgttcttacctatgggatgctgcccagctccttcctgccctcccaaagacctgtcctttgacatgttcactgtggcaatcagagaaaaactttcccagattaggggaagacattgtgggttccaggaaggcagcaggagcagagggaggcttatggtgctgctcatgaggcagaagctgagggtgaccatgcatctgaacacctttccataaatgtatttcatgcatgttcaagaaacatggagctctccccagaagaaaatttgttctccaagaggggtgctgtcaccgctcagtgttagtttgagctgggggttataggagctaccagctgaccactttatcttcaaaatgcttttcactgtgaaattgtttgcttttaagaatgtcactagactctaccagaaacaacaacatagcctctgcatgggtccatgtgaagcagaaagtgggaacagaaagggtggaatacagggagtgactttgttctggaaacagaggtgaagccagtgggaaagagaaacacatggaagacagttaagagagctctagtcaatatggctgctgaggacttgttgtattgacctccccttttgcttgcacctgcaaacatggcaaatattagctgctctctgttaacactgaatatttctgagactggaaacttttggtagaaaaagcaggaccataaagcactaaagtaggtagctagttggaaagaaccaccactcagattttcgaaatgctaaggggaaaacaagatctcaacaggatttgggtttgtgactgacaactactcttacatagctccataagtggctcatggccatccaggcatgatggtgcacacttttaaacccagcactcaggaggcagagaagtctctgagttcaaggccagcctggtctacagagtgagttccgagacagccagggctacgtagagatcccctgcttaaaaacaaacaaacaaacaaaaaaacacaaataggaaggggatttcataactataaatggttcatctgtgatgctgaaacaatattgtttgctatccccagaggaataatgttaaaggtgtggtctctaacttcagtaaagcctggtcctttagcattacattgtttccagaatgacagaggacacaaaacagatgattcacactgaagggctataaacatggagatttgtccatgatgtcagcacagaggcagaaggaaaagcccagaactgtctctgtgttttgatggacatggaacgatgaacatgtcattcctcaggttttgcagcaaagtcaattaaccgccttaagtctaaataatcagaaactgaaaaatcctttagtttgtaccaacatcttccagagccagcgttgtgagctctgttgtgatgagttgtttctcactgtgaatgtctgctttcaaaaagtcactaggtttttaccagggagaaaaaacccacaaagattctacatcaaagggcaatatgttacctcaaagttcaggaaatccctgcagtctgaacacctgtccattaattgagcccacagatattcaccaaaggctactgacgaagatggcacaatgtcctggtacaacactgtggccagagaccatgaagggtttgtggtgtcatcaaagcacaaggggccagagtacagtgcatggttttcctttcactttttgtgtaagagaacttgaacttagtcattggaaataaacagtgcagaagaacacaggtaaccttgatccttccatctctattaatgtgtcctggtattaacaaaatcccagtattccttggtagtatgggttagttccaaactcacacacatactcctgcatgccaggaaactgatcttgtttctaccttgcatttaagacaaagcttgtcggtgcagctcttagcggtcacaaaaggctgtatcataggtatgactgatggttggagtaaagagtcccacttagctttcaagttctgcaatatcctcactgataacagggaggtaaatgaagaggaagcaagccttcaataaagcaggaagtgtgtggtgagctggcatcctcggggtggggggctccatatgtcccatatcactaaggaagcagaaatccaaggcaatgctttcctgcttctcacataatcccaaacagtccaacacagtgcctggaatgtgtaggtgtgaatgggtgtagagaagcaaggtcactcagatgtccctagtgatgcttttctctgtgggctgctggggacccagagcttccgatgtctctcaggcctgttctgcacttactctctacaacctgctaaatagtgtggaaggggtgtcaacaacaataataaccatagggtaggaaaatgatggtgatgaacctaccatcagttagtcatttaagatttgtcatgacacatgttagttacttttcttcttgctgttacaaaatactggacaaaagcaacataaggaagaaaggagggtatattttgattcacacctttggagtataggccatcacggtggagaagggtggcaggggatggcagtgggggccgtgaggtggctgttcacattgcttctgcagtgggggacacagagatcaatgtgggtattcagttcaatttgtcccctttcacttttcattcagctaaagccagcccctaaccacccaggggtggtacattcaaggtggatcttccttcctgagtcaaacctgtttggaaacctcctggtagacactccctcgggtgcattttctgggtgactctcaatccatccaagctgacagggaaaagtagctaccctgcaaggttattgtctcagcattcacagcaaagctttctaagcccatttgagtcaggatggagaaggggttgagaggcagagaagcttctgataccagaactgttctgactctaagctgtgctgtaagtgctagccttccacctgtagttccccttggggaaattatgaccggacagctaacttctggggagatctgggagggctaatcttcagtgtctagtttgattagaccctgagccagatgactccatgggaccctgggagcagcctgggggatatgtccgctatatatactcaaggaaagaatagcccttaggaactgcacagacatataatttggagttctgatcatcatttagtgtccccagttgttggtttgccagagtaagtaagtaagatagaggatgcttggctggaattcagtttcagacaagtaattagtaagcaatattttagtgcagttgtgcccccgaatattgtagtgaaacaaacctatgactgaaaaaaatcattctttatttgaaattcaggtttaattgggttcttatatattaagtggccatccaacccagataaggattggcgggacaatggtgagctttgaatgtctttgacatatataattattcttcagcttaagacatcaggtcatttaacttccattcaataagtggtaatgtatcccctgtgtggtccaccctcccatgatgtgtcccaactcaaaatgaggcaggaaaagttatatcataaaagtcctttgggaaactgataaaatatctgttttctttaatgtcttaaatattcatccaagcaattctgaacataaaatactagtcatagttaattcacataagttgcttgctttacattttgatttaaaaaatgcaagtgtgccacataccctgggggaacaaaccagtgccctggaaactggattgtgaagtaatttccccattaattatgacagttaagtggggttcaccaaggaggcacagtgcccgtaggatgaattgtaagaatgatggctgtttgggagtcggagtcaaatatcagcctttaaaccaagccgaagcccgggtcacagctgccttctgtcactgacacagcaaaggaagaaagttcaaggcgcactcaagagtctttcctgatgcatttttttcagatcccagactttaaccaagacccccctaagcagaaagcaattatactcaccagtttaatgtttagttcatctgtagtctcttagttttaaaaaaaagattattttgaagagatatgttgctttgaaaaaatgcaaaactaaaatgtgaagtggggctgcaaatgggggcaaggggtgcattaaatcacatttagacacaaatcctccaggtctaggggacccgtagattatccacatctgacagacctagatggtttataatcactaaaattgttttaatcatcctgggcaagttttactgaaatatagggaatgacacggggttagtggttgttggaatgagaagtcaagaaagcaacgcatacattaatggaggctagtagtgcatctgaaccatggggtggttatcagaagattcctcgttctgtccacggtgacagtagcagctctgtaatcacaaggaaggttgccagctgttatctgccctcatctacttgtcccaatcttctctgggctgcccttgttcttcctggtgtttagagaaaaagaagaagaagaaggaggaggaggaggaggaggaggaggagaaagagaagaagaagaagaagaagnnnnnnnnnnnnnnnnnnnnnnnnnnnnnnnnnnnnnnnnnnnnnnnnnnnnnnnnnnnnnnnnnnnnnnnnnnnnnnnnnnnnnnnnnnnnnnagaagaagaagaagaagaagaagaagaagaagaagaagaagaagaagaagaagaagaagaagaagaagaagaagaagaagaagaagaagccaggatgcaaaagtacaaggagggcaagaatacattcttggtgaacattgttctctggagaagtgtgggatttaactgtgtaattcttgggtgtgcatgagccatagtctcgtggggacattgtgcaatggcaccaaggcaaagaggtgtgtctcatcacacctgggctcatcatgctcatgtcctgctggcattcagatcttcagataagctatgcattaactctgttaggagatttccctgagtgcagaagaaccagcactctaagttccatttacagcatctcaggggccagggcaagtgctagtatgatgtggaagcccaggctgatgggctataaaatctctgaacaaatattcattgcagcttgataggaacagcaatgtaacatctattaaaccagaggaaaatgattacctcagatttctgcatcctttacttagaacctgttggccttgttcttcattttacacccttgccctgctcaatcatcttctaacttccctttgtccttagcatctctagcactttgctccatggccccttatagcctgtgtgctttagctcaggcactgtgcctgctggaattccccctagtcttaagactcaattcaaaagtcctgctaaggggtcagagagtgtgcaagcatgaggacttgagttcaaaacccaaaatttcatgtaaaaagccaggtgtggattcatgtgcctgcattcccagcactggggaacagggaaggaactcacttggcaaggcagcctagctgaaacataaggttcccacctgtggaaagacactgtctcacagaaacagggtacaaatgagagaggaaggtatctgacatcctcctttggcctcagaatgcattagcacaggtgccactcccatacactcaggttcagccatcacatacacacacaccacaagcaatacattttaaaaatatcacacctccctcctacaaacttcccacttagagtgggtgtcctcctctatcctgttgcagccctatgccacaccctccgtgagaacacatggagcagcagcttccatgattcctcttctttgctttctcagagggctccatgtatctggagaacagactgtgtcttttctgcttttcattttcataactgaatttaataaatacacagggatgatgaagcacagagaatgagtgttctgaagtatgtaaccaaactagattccccgtcaggatatagaccacagacaggacactaaagaccagacagacatgtataaaaattcaaagttacaaaatgtaacagcattatcaaagctcagagtagcagcttacctgtaatccaagtactcgggaaactgagtcaggaggattcctacaagtttgaggacatcatggactacagcattccagaccaacctggcctatagtgtgagaccctgcctcaagcaaaacaacaacagacaccacagacacatagtacacatatacacagcacaccacacacacatacacaccacatactacacacacacacacacacacacacacacacacacaaagtaccagcagtgaaaattgcaatagttgagaaaatgtaaagcacatttctgtggcaagatggagaggcagcttcatgcagaaagggatttggggtgggctttgacagtgatattaaactagggagtctctctaggaggaccaccattcattctagaccttagggcacagctggaaaatagatgataaagagaaggccgtgtatgagtgcaggatatccgctgaatgcaagcgaagcacagctggatgcctcctttggcccaagcacccctaagaaaatgctttcggcaaccttccacacctgtgcagtcctgtggatgggtgcacatggcttcagcaagttaagtgtgcaactctgcctcagagtgtgcgttaactgccttctcctaaaacaacctgttctgtgctttcagtgtgtttcacattacaggtccacgtttgtgaagtgtttgagaatgctgcagagctaatcctgggaagtctgggaggcattcttggtgtaccttcattgctacacttcgactctttggtttctgtacctgaataagcccatttgactagagagaaaaagtgttcaagggagagggaaaagaggcaaaggagagaagataacaaaggattctaaggcacagagctgtgctgggcaggctgtgctcagtggtgggtgtgggaaaggaagagaaccagcagccacagacaggtggtggccaaactctgggagcttacccagtgaagcatgtatggggccatctgcttccacctaacttcaccacacagaacaaaccattggacatttctggtcttagatctacacacacacacacacacacacacacacacacacacacacacacactttagaggaactactgactggtggtgactcattcagaagccatttggataagcactggtaaagaaacatagcaagaagtatgagagagagagagagagagagagagagagagagagagagagagagagagagagaaacagagacagagacacagagacacagagagatgaggttgcagtccagaacgtgatgtgtagtatactggtgacagggacatttctccttatggggagggtggtgctgggggcagaaccttttcattggtttagccatcttgaggagagtggaggcctctcgctttgtttctgggctggaaccaagcctctcttccttcccatttaaacttcgtactaacttaagtggttccttcagtctacttcgcagatgattcattacttcacggtggccagcaggtgtgcagcttgtcctttctccaagcacacagaggaacataggaaaaatgcatcacttaggagagaccgatttttttcatttgggagacaagccaaaaaagtgaggaagctgtggaggtaaaactctcctctaagaagaggcaatgctctctctctctctctctctctctctctctttcctttcctttctctctcttttcttttcccagtttcagcgaccacgtttttgtttttgtttcttctctttctggtatatctggctggtgtatgcatgtgtgtgtatattcaggcacaaaaaggccagaggtcttcctctattgctttccacatttttttgaggcagggtctctacctgagttcactggttggctagaccatgtggctagtaagccccaggaatcctcccgtctttgctagggttacaagggttacaggtaagcaccttgcctggttttggtgtgggtgttggacttcctaactgcattcctcatccttgtgcagggaactctttatctgctccttcaactcccctgccctatatgcttctcctaaatcttccactgacttcctaactgaacctgagttcaaaatgtcagttcccatgaaagggcaaggcatgcacattcggaccactcttttaaaaaaaaaaacacaaatggatgcaattaagaacttaaagaagcaaagtggggtttccagcttttagcagacttcagctatttgacagttagtttctactgagacacagctgcctgcagagggtagttcgggtagccaactgctgctatttgagatgaaaaacttggccaagaatctgaaggcaagctcacagtgtacagcatgttccacatgactgtgagtctcattgggacgacaacagcatcaacagttactcgagctgggatggttatttaaaccttctgccttagaattgagtttgccgttgaccagcatcagcaaatattttatattttattgtctactgtcacaaaaggataggaagtcatggagataaataggaactaatgattctagagacatcatgccctttgtcacacttaactcttacagtaacccagaaaagttggtggggtttccttccctccctcccttccttccttttgctttgggaaagggtttctctatgaagcctcgactgtcctgaaacctgctctatggaacaggctggccttgaactcagaaatcatactgcctcaatctccccagtgctggaattaaaggtggtatgtgccaccaagacctgacttccttcaatttcttaagtatgcttgtttgtgtgtgtgtatgtgtgggagggtatatgtatggtatgtatgtgtatgtgcatgtgtgtgtatgtgtgtgtgcattatatcctgaagctcagagaagtacattgtttaagatctagtgatatacaaatggaagtgcttggatttgcatctaagaagtcttgttcttgactcaaagggaaaaaaaaaagcatgtttcagggccaatgggcagctcatcatattaaaggtggggttgccaagcctagtagtcagagttcaatccctggaactcacatggcaggagagatctgactctttaaagttgtcccttaacacatatgtaccacagtacacatgcataggcacacacataaaaaatgttacgaatgcatgtttcctctaccctctctgtttactaaacaaccaggatacagctccaatagttcctatgttgggaatactgtcttctagtttcagggaagcactctgtctttattgttcaactgctcatactacacattaccttatatgaaattctgagcactgccaagaaaatgagatgcaaacaccttcattatgcatatatgccctctctctgactctctcccttccctctctgtatgtgtctaatatatacatatataatatttcatatatgtatatattacaattgtgtccttgttacaaacagggaatgaaaagaattagaactagcagttgggcatctttgtcacttgtcagagggatctttgcaaagcccttgaacccaaagcatcattaacccatctgatctatctgtctggagactgcaaactatttcacatcttacttgagagccaaccaattgttttaaagagagaaatgcatccttggcggtctttctttaattgaaactcggggaatactgccctggttgctgttttaagcacgagaaagggcggggcttctgcagagagtgctggctctgtgtttcctgtgatgatgagcaacagaaaacctactctatccctggaatcttctggagtccagacaattcagcaccctcttgggatgagtaaatatcagtctgttcccaggaagattaactagttagatgaggggagaagcagctcctttctagagggctgaactttaactcccgcccacacgtcctggggcaaccgcttggatgatttacttagatggcattgtgatttctggaaagaatagatacttcattcagttttaagagtagcagtagtgtctttccgagacattacttttagccacaaagttaatgtttgctaatgtagacctttaaaaggtcataaagtaaagttgaattaggaaatgtgaactccgagtttcctcaggaccagccatgtgctcacaagcaaagtctaaatttcctcttgtgttttggaggtgggcaggcaccaatctcgggattccctcgtgctctcactcatattaagaaaagaacgaaatgaagaatattaggttttctggaggctagagtgatggctcagtggttaggagcacatactgactgctctctcaggctgcacaactccaggggatctgatgcctctgcctccacgggtttcggcatgcatgtgcatgtaaactcttgcaggtacaccacatacacatgcattttaaaaataaattatgtttttaaaggacattgagtgcttgggtagctccacagatcccactgagggctgcagcactaataaagccacaacctgtgtggatgaatttctgaattgtctgtggtgtggactgaaagcaatcctgcattactggatgcctctgagaagccaacaagatccctggaacacttgggctggaaagggtcaaagaattgttgtcaccctccctgtgtaaagtgaggaaacagaggccctggcttgtcaggcatcaatactcattattcatccacagcaatatgcctgtaagaatccgatctatgttgcttgagttatcatgctgcctcaaccattgggaaagttttatttttatcttattttttagttagttgagggttcttttcctcctctgaattagaaggaaggtcatattgctgactcttggtttcagaatgatgagtcattcatgaattatctacagtcttgttcctttctgcttcctgtctcctgccatctctgtcacagggctattgtctttctgccaccgcttgcaatggagactgaaagtagattaatttcttgttggcagccatgcctacagacagaaggctccttatagctaagcctgtcagcgacaatccctctgctttgcctcccagattgacactcgccccgttatggtttctttgcctaggaacctgaccttggtcttgtcattggagttttcttgctctccaaaaataattatttaaacttccttgtgaccaggtaccatgtaactaatatgtctgcaaagtcttcagggttagagcccaacttctttcccccttccactaagcagctgtgtatgtgagtgcttggatgtctgtggaggcctgacattgaccttaggtgttgttcctcaggagccatccaccttcagttttgagacaggttctctcaccaaccctggagctcactaactgtgtgagacttactggccagcaagccccagtgatcctcttttctctgcctccccagcactgggattacaaattgcaacccaacttgggtcctcatacttttatagtaagcattttgccaactgagtcatctcccagccctgacactgactcttaatactgttgtttaactagaagttttctcttaacctccagatccaaacacttcttggtgtctctgtgtcccaaaagcacgtcaagcacgcacacgcgcatgcgcgcgcgcgcgcgcacgcacacacacacacacacacacacacacacacacacacaccactttcttcccctgcaggtttattaatcgagcgttcttcagccatgcccatgctccatatccatctctcatattcattgtattttgcaggatcacttgtgtctggcatccctttcctgttactgttacagctgtgactcaattcggcacccatctttctccttctgtattgtcatagtagctccatagcttctcccatggtctggccctccactctaatctgccctctgctgcttccagagatcattttcaaagcccaaccttatcactctccatcatcagaggagatggcaaagcctccaacactgcagtccccgccacgctctctctccactgaacaggcataggtgtctgtgacctatttgcagtggcccctgtcattcctgagacaggtgacttgctcctcagggatcctgccaagcttctcattgtcacatgctgaaaatccacctgagggcctctgtaagggcctcttttaagaaccattctttttagctaggcgctacacacatattcttcattccatgtattcatagcccttcacatgtaactttatattacacttttacacccatctctccccaactaatgctcagcttatcatactgaataacaggccaaaagagtctgtccttaagtccatgtcaccttagtcaattagttagtgattggtacacaggaagaataagtatttcttgaatgagtgtgctatgacttaagacccaagtgatattatcattgtactttcataattaatattttaatttagctactcattccttgagaagtatacccaatatctcaaaaagtaataaaaaataccatcataaattccatgatgtcacatcgaggtgctaaaagtttagaattaagatttcaaaaagcattttatatatcattactttcagtgatttttcaggtttatctaaagtttatttaaccttaattaatttaaattcctctttttaaaaagtgaaatcatttacgttactatgttctcaagtttctgactattgtgttagacccgaagcctggtaatgtcttagaaaaagtggagtgagacaagctggtgtgcagtctaaaggagtggtgcctgctggaactatggggggaaagagagaattgtaaagcattggtttttgaaccaagtgattaagccaatcattggcttgcatatgtataatataaaatgttacaagagttcaggtcccagttcccatatgaaaacccacgtggcctcatgagcctgtggttccagttcagggaggaaacaggaggaggattgctgaggcttgctggctactagcctagccaaacgatggggaatttagttcattgagaggccctgtctcaagagaataaaggcagagactaatagagaaagacactcaatgtctgcttctggccccagcacatacaaacacaggtctatgcatctcccaacatgcatgctacacacacaataagtaaaataacaaacagaaagtagttacaatagtaattacttgacactgtatgccaggggggatgcttagcactttctctgtacactaatttttcccaacccctcactgacataattcctagtattattcccaccttacacagagctgaaagggctgtgggaagacacatcattgaagtaggtacttgttctttcttggttaaatgaatgcatgcttttaaaatagttttgacattctattaattagtaaataattgataaatcatttcatatattttatagactgtgtttgtcatataaacatgttaagaatacaccaaagatattgagaagaaaggaaaggaaaacaaatttactgagagacaccagaggcgggtagtgctcactgacagttgtgtacattcacactttaatcttataagcacttttaagtctacttttcaatcaaaatcatgaacttactgttttgtgtgcattatgtgtgcttgtgtttccttgtgtgtgtgcattgtatgtttgtgtttccgtgtgtgtgtgtgcttgtatttccctgtgtgtgtacactgtgcatgtttgtgtttacatgtgtgtgtgcattgtgtgtgtgtttgtttccttgtttttgtgcattgggtatgtctatgtttcattgtgtgtgtctgtgtttccttgtgtgtgtgcattgtatatgtctgtgttccttgtgtgtgtgcactgtatgtgtttgtgtgtgtgtgtgtgtgtgtgtgtgtgtgtgtgtgtgtgtgtgtgtgtgtgtgtgtgtgtgtgtgtgtggtgtttcaacagatatgaactagtctatgcattcgggagatgctgaggcccattgcttgataagagaaaccatttcttgctggagagcactgattttaaaagtaatcaacattgacttttctgtcactattcaagtaagcatatatttgaaactaccacaattaaaagaccttgaaggttataaaataccttccttgggctcacttcttctaggatactgcccgacaaagtgcactaaagggtgaaggccattgttatcctgctcatggcctttgagcagagttgagctgcctctactgtgagattctagagacactgagaaagtctctcatcttaaaatatcttaggtcttaatgttgtgggccttgggaactgtgtctccttgttttccattaacaaataaagcctgtaagagtggtaaccacttaggtttttatcacactcctaagtggtcaagatgggaggtactgaacacatgttttcaggcccctctctatgatttcagttgcacaggccaaggaaggagacctggtacatttaataagctcattccggaatctgctataagtggcttcctggatcacacttggaaaaactttgaagtaccaggttttttcttttaggccaccaaacagctcccaaattatgacatggagatgggggtttgttattagttatcaatgctaggcctagctctcactagctcttataacctaacctgtttctcttcatctatattttacctgagggcattttaccttccttccttctgtatatcttactttcactacttcttgtgtctggcttatggctgcctggcttctggcccaaggcctgtccctccctctctccctagttctcttctcacttctccaccctaaatttctcctcctaattattctctgtacccaccaggccggcctatcactcttctgcctagctattggctgttcaactttttattagaccaatcaggtgccttaggcaggcaaggtgaaccagcagcaggtcttttcataagtaaacaaatgcagcataaacaatcgtaacacattcttgcattgttaaacaaaggcagcagaaacaaatgaaccacacctttactgagttaaaatactatttcacatcataaacaaatataacatatcattacatagttaaatattcaacaacactttgacttatggataattcacactttgtgatacacagagtagtgtgacagacaaaagtacaaggagcaagtggtaaattacttgttcaaaattccctgcccctgagctgctgtctggtgcagctctgcctgggttttctgttttgtcacctatggcctcaagtatttccaggtgaaatagaaacaagagctccaccccaacctctcagcaaaaacttatttcccaacctttctttctttctttctttctttctttctttctttctttctttctttccttggccttttcattttgctttattcagccttaatttttctgtagttttattaagatacatcccatttactcagaacatattgtatgatgtatttgacatacaatgaaatcatcattgtaataaagacaatagccacacccataaaaagtctatgtgttgtggcctcccaagagaagtatatactgggtagtatttcctcaggttgacaatttgggatgatatttccttttaggcacagccgaagaaatgttcacttggctaccatcctttctaactttttaggtggggcctctcacaagtgattaaaaagtgaggtccaataccttcaggatcagcctctcaagctggagtctaagacctaagaccagtcttgggctgtggcatcatgtcatgtggtacaaggaagtgagcatggatttgaggcttggaaactggatttccctaatctcctttatagtgtggtggtgatagtctttctgagtcactttgcttgacttctgagtccaaacttttcttgcttaatagtccaagaagtcagtcttgaatccatagagcataatgtacataacgtccctgaattatatttcattctcgggtgccagactcattgggtttgtatcacacaacgctgaaataataaaaaacaggtgccctgccaagtggctttgtaattggggtactaagagtgtagttttcaaagaagaaaggcagactgaccccagcgatgggtctatcgtcctactagtactgaataagccgcagattggcaggggaatgtagtgcctcaccacataaaggatgaaaaatcagacaagaatacttctgtgagttagggaaagtaaacttgattttataattactgcagtgaaaactgtggccagagcctgagccgtgctcctgtggtggaactctgtttggaagttagaccaacatttcgagagtgtcagtacagagaaaacaggaaggcagcttcctttctgaacatacaccatttcctggagaggaaatgagggcttaaaaaacgtccttcgttggctctggaacagagaagtgtcttagagatggctgtatatgtttactcacgcaggacaccgacctttagtaaaagtccttgaaagtgccttcttcttgtgatggtgccttgtgatgttcacattgtgttctgatggatcattgatctgctcacagccacatacatgctcacttggacagtgtctaacagcaccctgcaaagtggctccaagccctgctcttcctttaaggacactggtgtccccaaggcatgagcagcaggcagagcagcaaggcatgggcatcccctgcatgctacaacacaacttcgccctcccaacagtcctgtgagcaggcagtgcagacaaatgggggagagtatttactgatttaaagattcaaaagctgactttatttaatggtatagccatagcattacagtgaccacagtctatcaaccaattggcaggattatgagcaaaacccacaaaccaccagaaccaaagactgagactgacagtactggaatgtgtgtgtgtgtgtgtgtgtgtgtgtgtgtgtgtgtgtgttgtatggtgtatgtgtgtggttttgtgtgtggtgagggggtatatggggtgtgtgggatgtgtgtgtggtatatgtggtatgtgtatgtatgtctgtgtgtgtggtgtgcatggtgttctgggtgtatgtggtatggtgtatggtatactgtgtggtgtggtatatgcagtatgcgtgtgtggtatatgtgtactgtaatgtgtgtgtatgtgtgtacagtgtggggtgtgtgtgtgtgtgtgtggtgtgtgtgtgtgtgtgtgtgtgtgtgtgtgtgtgtgtgcaatgtgatgtatgtgtatgagatgcactgtgtatgtattgtgtggatggtgttatatggtgtgtgtgtgagagtggtgtgtgcatgtatggtgtaaagtgtgtgtatgtggtatatgtggtgtgtgtgtgtgtgtgtgtgtgtgtgtgtgtgtgtgtgtgtgtgtgcatatgtggtatgtgtatgtgggtgcacatatgtgtatgatgtatagtgtgtgcatgcagtgtgtggtgtgaggtatgtgtgtgtttgtgtgcaatgtgatgtgtgtggtatgtgtgtattatattatgtatgtgtgatgtgtgtacatgcatgtgtgtggtgtatgtggtgtgtgtgtctgggtgtgtgtgtgtacggtatatggtgtgtgtggcaaatgcttattagtgtgtttatgtgcacatgtgcatataatgtacacatgtgtgtgagcatgtggctatgtagaggccagaggtcaattttggtgtctttcctgtatctccacacacaattttccagtctctcactgaccttgaagcacatgaatttgactaaactgactggtttgtgagcttcaagggcccaaagaactgactggagggcatcttctgccccacttggacttttatatggatgctgaggatccaaatttaggtgctcaggcttgctggagtgccacctgactggatgagccatctcagtagcacactacctgacttttaagtggtagtttgaacatcatattgagttatcagacctgtaaagctttacagggtttaaaagataggcttgaaaataatagaaatggcattttcatggctcagtgttgcctaatggaaagagaacacaacagaaagctctgctcagagtgtgcactccaaaggcaccccagatacaagggagatctccagctggtacagcctcaagaaatcaccgccttccatagtgggcagggtgaaacacctcatgaaaacgaaggggtcctcgtgacctcggcctcttccctcagtcgccttggaagaccactatggctcaaatttagtgtgttccaggaggctggtgacaccttcccctcccttctcaggatctttctgacacttcatgctctatatcatttctttctttctttcatttaaaaaatgagtatttttatgccgggtggtggtggcacatgcctttaatactaacacatgggaggcagaggcaggcagatctttgtgagttcatggccagcctggtataccaagtgagttccagaacaggctccaaagtaatacagagaaaccctgtctcaaaaacaggcaaacaaacaaaaaaaaatgagtacttttaaaaatattcatttaaaaccatgtggttcctaatgtatccccctccctcagaattttctctaagtgtctcataagtaatattctgagtttgcagagttgcccccaagtccacactcaagctgtctcatagtctcttaccttttttgcatcggtgtgtggatttgcaggcaagaaagaatgaatgtacctatgccttcagacttcatggccagagagtgcagggtgaagctactttcctgctgcccttctggccccttcagtctcccacagaaataactttccagcaaaactatttgcttttctcttgtttggtttaaaatctgccattacaattccccttttctcttcctctaaagaagcccccatttaatactgtgtgtgtaaagcgaacaggtgttctatgttcacagaccgttttgaaaagattaaggaagtttgtatataaaggccttttttaaagctaaatctgctgaacagggaaaatcacttccatcaaaaccagaaatcaagatagcatttacaaccagaaggttcatgcttaagctggtgtaatcaaatgcttcaatttctttttgaatgtgtagattttcctgaaagtccacagggggctatttgtggggttttcatgggcaacttgcacattgtaatcaaaagtctgaaggagcaagtacctcttctctacctcttctctcccaagcgtcaacaccttgacatcagctctctgtgctctaagccagaactgggggctgggaggcctttgcgtaggagtaacgatggaggtggcaatgggaggaaaacacattttgacctttgagaggaaagcagagggctctggcggtgcaggttctgatcatcagcttctaatggagagccgcaaaagctgtgtgtgccaccagttgtaagtcttcagcccatgagcccatatccacgccccaactagagcctaagcagcaggtgtcactccatcacacttgttcttgagtctgaaagggtccctttcccagcctggtgcatgggaacatggtattcatcagctaaaattggatggattcaattaaactcagcctgagtgtgtgaaggcttcatcttctttccatctccccgagtacactgcatcaagtttactgtctcacacactgatgggaagcagagtgcccaaacctgtgaggagtctgaagtgagccagctgtcattttgagacaagggcatggagttccttcatagacttggattccataaaatcaattgaagaccctgcatgagagttctctggatggttctagcaaaacagtagatggcaccaggtaggtcactaagtgatcttcaaagaaaaaacagatcagaacatttagttgtgtggcgaccagatggctttgcattctaccatattgatattgtcctgtaaaattcacacattatagggggaagaatcacagcagaaaaataagacagcaaagagaaacatgtgtcaccgaaatttcttactaaggagcatgggccagcatctaaggagagctcctgtggtggcagaattgtactgatgctgttctagggatgttctctaattgaagtgagaagaatgaaaggttaaaagatgagatgctggagctggagagatgggtcagggactaagaggacttgttttttcagagaaacccaattcagttcctggcactcagatcaggtatcaaaactccatctccatgggattcaatgccctcttctggcctccatgagcatgtatgtatgtgcgcgcgcgcgcgcgcacacacacacacacacacacacacacacacacacacgcacgcacgcacgcacgcacgaacgcacgcacgcacgcacacacacacacacacacacacaaataaatttaagtacagctgcaattattctagaacatgaaaggtctctgagatgtaccctggccagagccagcagacttgggtttcctggatctctctctctctctctctctctctctctctctctctctctctggtgacgctagcaacttctggtggtctctctctgagctcatttgagagtccctcacgaagccacttctgatatgaattgtgatttagaaagaaatgtgcaaagcatgtgaagttttgccaaacctcttaatgcatatgctttcatctacataaatccagcaataaaatccccaggcccaaatccagcggccttttcatggatggtgaccataacagcgatgtcttaataatgtgccttttggaaggatcctcctcactcctcttattatgggtgtacattcttataagtctgatgcaggcggtgcctaaagcactgtctcccttactctgttagcatttgtgtctctagacaattttggttgggaaacaccttgatctggttctcctttgcagtccctagctagacccaggctgtcccgcttggtacttgggacatattgaaccaccattggtgtggtggggtgacgacacatgtgtctcttcccttccatttgtcctttcaaatgtacttccacccttgtgcactttctcgccttctgtttgtagcaccctttggagcagcctgctgtaatagtgccatcttgtcctcatttcagtgtctcacctcccacttctatcacagccctgcaagcctgaaggtggtgactgtctctggtgttcgccccaaatccaaagatccccctacacctggatagtaagcaagttcttaactcctccataaattacacaaatttgagtatggcatctattcctgccaaaatacttatgcctacagcagacgaatgggaaatgatttccatttaaaatgtattttgtactcatactataagcaataaccatgctgaattttttggtaaacaattcaacaaacccagccctatgtgggctaaccttgtgagttcatctccaagtaccatgttacatattcaccaagtggccctaccacatgtgcatttgtgaactggtggttatatctgtttctttcttttttttgtttttggccctttgtatttagcatgatgacatgctgaccaccttcctacagcgggtgtgcattctgcctcttcctcctttctcttactgtggtgcttgtagtagtttgctggccgattgaaatctaagataatagaatctaggtattgatgaatcatgaatgcagcctaagcacagaactgtctaatgatgaacatcttgcacatttgaggtctgatctgataggaagtgttacattcttctccagagccagcaggaagtaagataactgttccaccggtccagtcatggtgaaactgtttaaagaaccattaaaatgtcaatcctttagggactgtcaaacattaactcaggtttttgtcataaatatgtaagcaccatgaacatacatattcacacacacactcacacacacaaactcattcaatgaagacctgatgaactgaacactccggggtctgttatgttgctgtcctgtgtttaaagatcacgactcccacaccgccttttgtaagtgatgagaaaggcaatgcaggctcatgctttcgtgaatatatactggatttctattgggttcagagttttctgttgggtagcaattggagagtgcacattctacaggaaagatctcaacctctggacactcgctcaaaggcagcctgccttcgcccgcccagtcctggtcttcacactcttagaagaactctactgatgaaatcagtgctttgctaagaaagtgtcaactacattgtgcctctccggactcacatgctgatattaaaatgaaaaacaaacttcttccataattttttgtaatacagccccagttgcacaagacagagtcttccactacccctctttcctagtgttatgactacattagacaattttccagattcttttgttagctttctgtttcttcacttgagcaatacaaaattttatattcaaaggtatttgatttatccacaaatacttttaactgtttcactacaaatacatttgtgaattggaccattcttgcagagtaacccctatttgaaatatattgaatgaaattacaagtattgagtatttgtttcttaatctaaaaagatttctatacctcgagcttataacatggaaagatgttgtcatagccagaagacacatccctgtaggacactgaatcttctcctcttgcctctctcctcttcctgcttttattcctggacacacatatacctatttatcattataagaaacaagtttagatagcatgaatgcttcatagattccatcaagtaggatcaaatgtctgtgacaagaagctagatgcagcaaccaaacaacttctttaaataattaattcatgaaaatccattccatttcacttcagaattcatgtgataaatgaggtatttaccttattttctgttgaaaaaatagaatagaaaagaagcatcagtcttttgggaggatggtgtatgcatgtgatgtgcatggagcctggaggttggtgttgtgtggcttcctcaattactctttacttttgtttagtttgtttttctgagacagtctctcactgagcctgaagctcaccaattcatctgtgatgaccggcccttggtctcaagctgaattacagttgtgtgggaccacacgacggttaggaatctgaactcaggtccccatgctttttcagcaacaacttactatctgaaacattttttccaacccctaatctttttaaaaaataaaaaaataaatgttcacgtaaccatatgtaattttgtgttcaaattttaaaacaaaataaactcagaagtaaaattaagtatctcagctgtttctgccatatataattgaagacaaacaccccctatccccatgatcacttctttagccttgccatgtgagagaggaaccattgccctctgacagtttgcttcactgtgttttctcttctggaaaatagtgttttccagccagatccatgaagctgttttggtatttctctttcctctccctcccttcatgtatcctacacatgtgcagaagataacttgtgagaacaaagtccagaactgcctcacatgtcacaggaagagatggcagagtggggacagctattagctgaggaaaacaattaagttgcagggtggctgtcctgaggatcactaacttaggacatctttctctaatgagattttcagacctggcatttgctaaatgtgggagcttttgtacttgttttgcacttacccacaggataagtcccaagagagattccatccattcctcatggagaagcagatgacaaagaatgaactctcagtaatcactagttaggggattgtgctcacagtgagatcttactccagaaatgagtctcagaagaaacttaactatttttttccagggggatatgcagactcagctgtggatccccttggccacaacaaagttacacttatctagatcattaaatatgctaatgagtgtatgagaaagacttattgctgacagtcatcaaaaacgtcatgtttacatatccattgtaactaatatttcatctgctggaattaatgttctttctgccttgcagaccataataactaactctctcaggatcaagtgcactgttcatactttccttttgccccagctgactcctagccctccaccctttccctttattctccaaaggtagcttttggtgatgtttgctatatattaatcagtgagtccctttgctatagaactaggtgagttttattgaataaaatgtttggtcttcattttggcattaatccaaattgctgaacacagagggtcttttatcttcatccttttattcgtcttatacagaaagtgtggttttggcatcctgcctgttaatgtgctgctgttttctcctgatgtatgtttgtgtgagtcaacagaaacctgttggactgaacagagtggattagtaagactgtatgcattggggtagccagatatggaatctggggtggggaaaaccagaataagaggggacaatgggctctcagacatcaggactgacaagttcctgcaacgacagtcaccacagattgatttcccttcacatttcctcagaacaaagtgacaccatgaacagcaagtactctgctttgtcacccttgttcataggtacacagcccaaagaatctgctgcctgtgcctcaagaaaggggcaagctctttgaggagtggggccccagctcaaggcttcgaagctcactcatttcttaaactgaatctttctgtgaagattttaaacaaagccttccagagtagctcagggggaaaggctaaaaagtacctctgtagtgtgtgtgtgtgtgtgtgtgtgtgtgtgtgtgtgtgtgtgcgcgtgcgtgcgtgcgtgcgtgcgtgcgtgcgtgcgtgcgtgcgtgcgtgcgtgcgtgcgtgcgtgcgtgcgtgcgtgcgtgcgtgcgtgcgtgcgtgcgtgcgtgcgtgcgtgcgtgcgtgcgtgcgtgcgtgcgtgcgtgcgtgcgtgcgtgcgtgcgtgcgtgcgtgcgtgcgtgcgtgcgtgcgtgcgtgcgtgcgtgcgtgcgtgcgtgcgtgcgtgcgtgcgtgcgtgcgtgcgtgcgtgcgtgcgtgcgtgcgtgcgtgcgtgcgtgcgtgcgtgcgtgcgtgcgtgcgtgcgtgcgtgcgtgcgtgcgtgcgtgcgtgcgtgcgtgcgtgcgtgcgtgcgtgcgtgcgtgcgtgcgtgcgtgcgtgcgtgcgtgcgtgcgtgcgtgcgtgcgtgcgtgcgtgcgtgcgtgcgtgcgtgcgtgcgtgcgtgcgtgcgtgcgtgcgtgcgtgcgtgcgtgcgtgcgtgcgtgcgtgcgtgcgtgcgtgcgtgcgtgcgtgcgtgcgtgcgtgcgtgcgtgcgtgcgtgcgtgcgtgcgtgcgtgcgtgcgtgcgtgtgtgtgtgtgtgtgtgtgtgtaagtatgtcagtcagaattatgtctgacaataggaactgagaagcagaagtagggtaaatgacaaatgctgatttttctcttacacaaaaagtaccaagttcaagaagagggaggcaatgccacactgtcagggacccatgttcgttcctccttgtggttgtgtggcttctgtgatgtgggacaagatagaactggagacttggccagggagatgtgggaatcaggaccctaagcaggggctatgcccccctcccttggacctttccagaagttatgcagagtgcttcctcattgagggagatgatagtaaaagtagctttattttgggtaaatttgtcagggttagtataactagtggataatgtctatcttcgggacttctgccagtgtccttcccactttcaagataagcttctgttctctacgccggaagtggcatcatgcatctcctcagtctgtccacagtacacttaggacacaggcttcaattcaggaactttgtaaaaaatagatgagagtctgaaaatccagggggaattacaagatgtggtgaagactgtggtccccacactgatgaaaatgactgaggggtaagagcatcaatgccatttctctggaaatgtccaccttccctaaaacatgtgacagatttgaagaatgcttccggatgcctcaagccggtggaaaatggcttcgccgttcacatcctcagatgaattcctaggcccagtgagaatctctaaggagaggaaactgccctcaaagcagggctatagggccagttggcagttgtgtaacaagtctttctgattctggttttgccatttcttcagtccttcctccctgatgccaccggtgaacttttaaaatgcagactagctctgcaaatttctaggacaaatccttcaacaaaggaacagcattgcctcctgacctgggatgtgctcactccagctccagatcaaaatcccacctcctcaagtgtgtcaagttccttgtggagctctctagaacatcctctcccttatccactattacacagcacctgtccttgtgtcctgtctgaggtcattggtcctaccccctcacgaggcagatccctgtggcttctgaggaagcagatccctgcttcctcacagcagttgctgcgactgcttacttgttggtcttcccatgtaactagacaataagctcctgcaggcaggagctggcacactcccaggacaaagttcttaactgatgatagaatatgttgatattttaaatgatgctcaaatatcagctaatagaggtgagggagagacagtgcaagggaaaggaaatgactgaaaaaaatctgtgtccgtccatcccttcatgttctttatgcaatgtcaggactcaggcctgtcaaggacttgcttccctcctcgactgagattgcaccaaagcccccaaagtaccaaagcccccaaggagccaagcgagtgatggagtagagttgaaatactagctatgttaatggaggccaggattgctcagactgaatttatagctacataaattgacccagatttactttctattattcaaaattagttatgtcaaagcaagaggcttcttggtatatacattactgctaatgtgtccctggacataaattttgtttgggtttttattatctgttcttgagaattgaaagtgaatttcagacagagggaagcctttgcttctttgccacagagggagcagaatttgcctgagtgcagctcatggcctctgggatgtacatggtggtggctagccacccctttcagtctcggctctcacccaccttccatcctctcatccacccttctcagcctttacttggtatccacagactatcaggaagctggtaaccaaagaaacatcactgcattgacctagctgtatgggggcctatgtttatgcaaccccaaagagtggccatcttgaaaatgcccttttaaactggcatcattttctgcaattgatttgaaatgattaactttgctagaatgaaaatcacccaagcaaacaataaccaagtatttattttcctaagtgcacaagaaatacacaaacaataatctccacttttgtctcaaaaaatgacaagcatttgtatgttcaagtatgacctttccttttgctgagtccttcggaatcgtacagggcagatggttctgtgctatgcataggtcctgtatgtttactcggcgtgtcttctgcctacttttatctgcctcttagcaaaccacaccttgctctttttttctgatttctgcctggaagtctggaaggaatgactagcagtgttttcttgaggaagcagaccctggaagtccatgagggagggcggtggggggtgaggcagtggggccacaggactgctctgacagctcagcctgtggaggtgagctccatgtaccccagcaagaggcggcagaagagctggctggctgtagttagggttggatgtctacactactggaaacttgtagcttttctaatctcacatgcctgcactgcagcatgcaggaagaaataaacgattcctccagatctgaatatttgaatctgctttcatatgtgccacagagttgtggtgactagaaatttttaatctttttctgagtgagtgtgaactggacctgcccatttgtcagtatggctctcattgtcaggggaaaggggagatggacagcagaagggtgagctgtacctggaaagaccgacagtgcttacttcctgagaataagggtcgaaaaggagccaagcaccccggtctttaacagcatgactttccctggggaattttacatttagttcttgtgcctttggctaacacacaaagggcacacttagcctctgtgaacaaaagaaagcaacatttcaaactgtgatttgggggaacttttgcttctagatttttatctcatccagctctggatgtcaaggaaagagcatagatgacttcagtcaggccagatcccctctccttgctgtgtaccaccgtgcctgaagatagcttgtgacatgctatcatggagttaaacataaaagctgctgttggggtcaaagcaggaaagagccagattataggctgagccccttacctcttcctccccagtccttaaactcactttcactttgactacccagatacatacttcaaggaagtagagagtttattgttgctgttggtggtagtgatggtgtgtgtgtgtgtgtgtgtgtgtgtgtgtgtggattgtgtggtggtgctcctgcatatgggtgccatggatgcaacgttcctccttcggtctctctctgccttatgttttgaagcagggtttctcttgaatgtgagcttgcctacttgactatactggcaagccccaagcctcgggggcaggggtgtcccctgtcttctgaaatctggaattacaagcaagagtcaatgtgcccagccttttaaaagcacagttctgggtacaaagcctgggttcttgtgcttggattaaaccaagccattaataaaacagcacagctggcctacttaaatgcccatgcaatgccatcccagtgcacagttcagcatctgcaaagatttattgtatttagcacctgtctgccagtgcagactcctgactgctgtcatttctcctgctgttattttgttgtttatttttaagccaattctatatcatttgtcatcttgatggaagagcctatgtttgttgctgggcttcatgtaaacaaataagaataaggtaaaaaaaaaaacaaaaagaaaaaaaaacaggatacagaattcaaaaagcctaaatacatcccactctggtttctcacccctctgggctgttgacagagttagaaaggagcaaagaggggagagtggaggagaggtcccaatcagtaaagtgcttgctaagcaagcatgagggcctgactttggatcccctgtacccttgtgaaagccagacacagcatgtatgaacaccagacttaggagacagttggagccggaggattcctggaactcagccagtccagtgcagctgaattggtgagctctggggaaagtgagagaccctatctcaagaaataaggtaaagaaaaattggggatgatttttgatgtcttcttgtctgtacatgcattcacacacagctgcccccacacacaaacatacacagagtctgtcagctgttttgttctgttgcctagagtgaagtacacacagacattgaaaatgggaagaagagctagtttaagtaaatgtttaagtcaaatctgtgtactccatctcctaaacagtaagataaaaaatacagcaaaaaataacgaatttcccttttgctgcaaggaaggctgtcaatttgggatgggtaaatatattgccgttttgcatatggttatgaaaaatactgttttcttttttttctgtagctgaaggtgttatataaataggatagcccacaaagcgatctatcagcatgcttttaacatggttctctgccaagtgggtactgcagcatggccagatttgacagtgtctttctagctgggaaagcacaatgccctacaaactccattctccccagatcgttttaatccatgggagatgggaagagacagagagtgaatgaaacggttccagaaacactcacctgagtattaatgggcacactagatgcgattcctggagttcacattcttgtaaattagtctaaggcacatgctccaccagaattttgattttaaaataactcaatttggatgcatacaaaggcagggtcagatggcctgtgtgaaggcagccagcagtcttcgtgacttatagtcatcaggcaatgtccagttgccattgatgagtgctggcacacatcccaaaaaaaggccatcccagtgtggatgacccacctgcccttcatacagtgcctttctctcttccaggtgacttgcaggctaagtgtagctagaatggtcttccaacagaaaagccttcctgatcttttgaaagcagtgttctctgaacagctcagccatgccagcaagactctgggtggaaggccagggatatgattataaagtcacagcttgttccatccactgtcctccactcctcttgcaccatgcaaccttatgactgggaacatcgtagagatctttgtactttcagtgaatccgtggccttgtggcattaactcctgatctaaggcgttttatcttatactacaacaactctggttcccccctcatgtccatgccctccaaacccttctgaagaaggcagacaaatccaaacagtaagttacctgtgcactcggacaagaacatagtagatgggggctaagcacataaacaaagcctcaaataacatcagttgttttggtagctacatgattggctgggcttgatattaatgttgagtatgccattgtctcagaacaggccttcacaacaatattgattagttgagtccacttgtttacagtggatatgtgatgtctaagtatggggacttacttaacaagtacaacccatcattttatgactggctcggagttccagcttgatgagatcattttaattttgactcagtttctccaaacattttcactgatcttagttccatatcaaagatgaatttattaagcttgcttttacatattttttacaaagtcattggtgtaaattattttgcctgttgatggttctggatatggatgtgtaactcatggcaaatccatctacacaagtggccagatcatgacacaatagtcaggcagatctgggttctaaagttcacagcgatggtctagccttggacaagttcattaaactttcttaggaacagactcctatttaggggctgttgagtaactttgtgaggtaatatctgtgatgtgtggatccagatgtatgcctggtacaagcttgtctttcttccctctccatccccctgcctccatcacatgcaatatcaatgccttgtaggtcaggctttgattcatcactgaatgaatgatagtcaacagtgaatgttccattaaaatagcttcctctgaggactgaggagatgagccatctagtaaagtgcttgccacacctgcagtcccagccctgggtgactgagacaaaggatccctgagacttgctgcccaaccaagctagctaaatatgagagatacagatgcaggaaagagcttctaattcaaatataacaacaacaacaacaacaataataatatgaagaatgatagaggaaggcacacaacgccaacctctgccctttgtgtgcatccattggtagatgcactcactcactcacacacacacacacacacacacacacacacacacacacacacacacacacgcgccctcatccatacacactcactcatacacacacatactccctcatacacaaacacactccctcatacatacacactcactcatactcacacacacactcccatacacacacacacactccctcatacatacacacacactcatacacacacactcactcacacacacacactcatacacacacatgcacactcccccatacacacacactcactcatacacacacaccctcatccatacacactcatacacacactccctcatacacactcatacacacacactcactcacacacacacactcatacacacacatgcacactcccccatacacacacactcactcatacacacacaccctcatccatacacactcatacacacactccctcatacacactcatacacacacactcactcacacacacacactcatacacacacatgcacactcccccatacacacacactcactcatacacacacaccctcatccatacacactcatacacacactccctcatacacactcatacacacacactcactcacacacacacactcatacacacacatgcacactcccccatacacacacactcactcatacacactcatacacacacactcactcacacatacatattcacacacacactcacacacacaaactcatacacattcatacacataccctcatacatacacactcactcacacacacacacacacacacacacacacacacacacacatgcacactccctcatacacacacactcactcacacatacatattcacacacacactcacacacacaaactcatacacattcatacacacaccctcatacacacccactcactcacacacacatacacacatgaaaaatgcatttatgttttcttatttccttttaacaaatttctaatgggagatcatttcctgaagagaagagttggcaaaaataaggcttttgtttcttaaaccctcttgtaccttgcagctttagcctttgtcatgtgtaacccagctttcggaccctcagtagaagattccttttcatcatctttcatatctttaaactataaccctgaaaacaaaaggagccagctgaataaggatatgaagaccctgattctggttctttcactttgtctcccctgtggtgggctcttttctgaatgaagaatttggttcccacagatgtgagtcacccaaaacaacagaagcagagtagccaaagaggatggcaaggacacagaagtcatagagctgacatgctgtgtctgtaggacacctgtgaggagacatgacaggaattagtgcatctatggaaggaaaggggccttactgtctcatgctcacagttgagtcccagtttcaaagctgtagatttcaattatctgaaattattcacagggagaaagtgccacttttctctcttgtttacccacaacaatgtttaagctcagttatgattccaatggagaatttaaaacatccattttaagtgagcttttaaaagtctgctttctctcaggagtgactcatctgtaggtgaccaattacaagccaaaatggctgctcattctgctttaaaaataaaacatctaactcaataagaagactggattagaccctttaatcggataatggaaatccattttatatgcattaccaatctctcatcaaaccgtaccacagggcagcaaggggacattgcctctgtgttaaaccagatatgtcgggagaataatggtgtctgggctctcatttccatgagtggaaccagatgtggaaaacatccagtgcctagctctgaaccggaatcttctctgctaataggatgtgactgaattccaagaatgtttgtacagttaaaatagtagtaattgtttctcatcaggggctctctgggtgtttgaaaccctctccttgttggttttgtgggttttttaatgttaaacccaggcacaccgtctccgtgctgccctgaccagccctttcagagggctgcctcataaccttttcccgttacacttcctcttaagacatttcacgtgtgcttttcctttctacccacgctctgtgcttgccaccaaatttccatagccggtcccctcctactcatgacttcactcgctcctacactccttcagtcttagtgcagttcactcacattgtcactacaagttagataagaaaaaaaagttgacttccttaaaaggggcacaaggctcatgtaaaagatttcatatttttgagaatgttttcttctgtgaaggctcttcaaccctgtacactgcacttgccaaaataagagcaacccccacccaacctctgctggtgggacactcccccctcccatgccaccaggccatttgtgcctgttgactggttttcccatcagaagttcttaattatgagtcaataaaatagcactctaaagtcacacccccagggaaaggaaagattgcctaagcatctaggccactgggagaaggatggaagcaggccaagatttgttgtcttcctatttgttcatcaggcaaaatcagattttaaaatatgcatgaaaagctttcagaaactgctaaaatcagacttttattggtgttagaagagaaaactaaggttttaaacatgtgcttgcttctgaacacacacttggcattttctcttgaatcttttccggaacctgagtgttctcagagaggcgagggctcagttctctcacttttcagtaaagattaaaaagcaggtgctgtagtgagaactccagttgctaagatcatgtttccaaactagaaacatcagagaaacaactccacttaaacagaggcagggagagctttgtcacatgaatgttagactgagtgacagtcaagttcagctaacaaaccatgctgcagtcaaggcaagcttcaccccacggcctgtgggaaccatctcagtacccagaagggcagtggcaggagccattcctacacaagatactactagtttaaaattcttaggcctgtgagatgactcagtgggaaaaggagcttgctaccaagtccaatgacatgagttcaatcccaggattcacataataggagagaactgcctccctcaagctatcctttgacctccacatgtgcatcaagacatgtgtgtacctacaaacacacacacacacacacacacacacacataaagagaaggacagagacaaagatatgtaattaacaatcttaggaactttgggaattaaagtaagtacttcccagacaacttggaatttgattctcagtgatttcttaaaatagatatatatatctcctgttcttttgtttattccctcattcacttaaaatacaaatatttttgaaacatctatggcacatcaagtcaatactaaattggtatgcccaatggtccattcaagagtcagagaaacataccaacctggattctataattgactgatagaaactgaaacaacagtagcttttattaaccaacaattagatgtcacacttgacatattatctcgtgctatcatactaacgtagccaggaaaagaaggcaagcagcaggtgtgcagattcgtagagacgttggaagatgcttgaggtcccttttcactacagaaactaaaatcacacactacacatgtgtgcagaaaggcctctggctgtatttttaccattgtttgagaaagttttgaattcaagacatctagtttctttgagtctgccagcatttgtcttatggcattgggcttgtgatgtttgtgcctacagtgttctgtgacctgtggtagtcaaactctggagccaggcactatgagttcaaattgccactctgacagccaacaactgtgtggccttacgtaagtggctccaggctctctgcatccactcctcagctatcagataaggttcttacacagtagattcatgggaggacactggtgacctacatagcgtggcagctagcatccgcaaaacagccctcactccatcagctcctttctctgtttccacctacttctctaatccagttttgtgtatgtcttctttccagggaccccaaagggggccctcgttcgccagcaatttggcaggcaatttgtaaaagctaatatataatttatttaggagaaaaacctaattatgctgtattattgtttaattttctctggggcacacatctattgccacttactaaagtaagaaaagtaaactttgtcatctctcagagaggaggagtttgagttccacacatatggacttctcagactatgctgcacgcttgtcttgtaggccttgtcagaatgcagattctgttcatgtaggtctggggaggggccaaggttctccgcctcagaaatgatttcagtgtgctgtgatgcctgtgctggcctatctgggcacagtgcaatgagactgtacatagtgcacttaaactccatctgggtgagagtgcacgatcaaacatgtggaagctattaagacagagaaaaacatcaaactcaggacaagaagagtgggccaatgggcacagaaagcagagaagcatctctaggtcttaaaggccaagagcagcttgcatatgcccattcaagatggaggactatggagtagtactagcatgcaaatcatctgaaagccctgtttaatccagcttcttattcaggggatttgggggtaacttgcctcccgacacttctcaaaaactcccaggtggcaccagggctgcgcatctgcaactcatatgttgatttctacctcagaccagtatcagagactggagggaaacactgcatcgctggcttggacatgctgcctgccagacttttccatggaagactagggctcaggctccacaaagaacgagcccttctctgcaagcacctgtgtaaacagattggaaacaagctgcacatagagaagcctacagtgtgacacctggccagggcacagtcgcttgcctgtgtgacaacaccctcgttttaactcttcgctgtcccctggccccactatttccaagtcccattgtttctgacaattacatgcaaccacaagtccccaagacatgaagggtggcagtccttcctcaggctttgtacccactagaaagggcagtttgcctgagagaggcctgcttttgaggaccacctctcaccactcacatacctcacctcatggtcttcactaaatcagatacgaagaatcttcacatggtaaaagtcagggtgacaattggtccaataatttggagaacgacactcgatcaagattgtaagtctcaaatttcttctcttttttctttaaaagaatttttatttaatctctctctgtgtgtgtgtgtgtgtgtgtgtgtctgtgtgtctgtgtgtctgtgtgtctgtgtgtgtgtctgtgtttgtctgtgtctgtgtgtacatgatctgcaacaggggaaatgcattccatgtggcgttttttttctcccctcctgcctttctgggagttccaggattgagctcatatcatgaggctgacacagaatatgcatctgcccactgaaacgtatttctgctcttcataatttttcacaggacaattcctttttggttttttggttgcgggaagccataatcaccaatctttctcagatgctttggtgccaaagaaaatcctggaaaatttcatttttaggttttggattttttaaatcctagaattattgttggacaatatgggagttatgattcccctgtcccccttggaatttaacatactttcccactgtgtgtggatgcttccctaatgttgtttgtcagggtcttgctgagcctgtcatggtgacaatccatagtgctgtctggatggctcaagtacatggcccatgtctgctcatccatgcccacgtgcagactccctaagctgtgtatatatctgaagttgcttttctgtggctagttctaaagcaagcctatggatttagggccacagccgatgtctgggattaataccggacacccagcatgagtactggtgtgacaggtaacatagcagtgatgagacataagcaggaaaacactcctcaaaattccaagtaagaagggcaagctgaactctcctgtttgattttgatctaaccctaaaattaccataagacataaaaatccattcgtaagagtgcaaaggtcaatgccctgggaaacggaagcagatgttttaacacaaacatctttagaagactcaagatagccaaagcctccagtcttgtacttctgcagcataactaactggggtgagctttaaaatgtttgtctagtggaaggtccaaagactggaaacccattacttcttcatcaagagaaaccagttggggatagggactgggggcttgaatagcaacatgattcgtcattagagttggcccctaggtctgaatcccacatttactatctccctcaatctggccttagacaggctacttagtgactttgaccttgagcattgtctatcaagggatagtaatgacatttgcctaatggagttgtgacaggatgaagtgaaatgtacaggagaatactgactacagtgtgtgcttagaaagcattagctggagttcactaactcgcagcagcaatgctctgctttggagttgattgcacaggagggaagtgtgtcattgcaaaaggagatcggtttgtggggaaggaagcccaaggaacaaggaagcttccaggcccagagacacacgaatgacacacagtaggccttccacagacatctgttaaataaacaaggcttgaactaggaatttgtagaatttcatatagttggctgattttttctgatatttactgaccatcacacttaacaaaacatttttctgggtattaaataaacagacaggtagccaaggcagatctcagattctgttttgttgaaatgaaaaaggaggtacatagagaaacaagagaaacttaagaaaatgagtgtcattagaactcagtcagggtctggaaagacagctcagcacctaagaaaccttattgctctttcagaggccccaggttacagggatagcaagcacaaattactgtaactgtgaaatgatgtacttcaacacacatgactaaaaacaatgataacattcatttttgctttgagcccatagtctgagcaggctatgggtgtgagttggctctatttgactcctagcagagagcagaaatctggagctacagtcatttgaagacactttcggttgttggtgttgcctaggacttctaccgtagctgtcagctggaccatatgtcctttctgacgaagtcttggatgtcacataatatcctgtgcactctcttccattggtcagagacagcaaattctgtgagcctgaggagagaggagaacacagacttgagcccttggagcagagaagtgaccaagtcacactgtgagacgagcctatggcatggttattgctgtctggtcctttagaaaaatgcactatgtcactttcttgcagcaactttaatttttcttctgtcatagcttctcagtccatgctagatgttcaggtactttctgcattgctcatcttatcacttgctgggaattattccaaaagaggacttaaaaccttgttcctcaaagacataaggtcttagttttagactcaagtttggttattgtctaagacaactgtgaaatggctttgagactacattgggccaagaacatcagaaaaagcaaaggtgacttctaagggaccaaaaggcatggaaggaaagagaaatggaagaaagactatcacagaggagaaacaatgattgtgtgtgtgtgcgtgcttgagtgtgtgtgtagtatatgtatatgtttgtgtgggtgaatgcatgtgtgcatgtgcttgcatgtttatgtatgcagtatatgtctatgtgtgagtacttgcatgcttatgtatgcagtatatttctatgtgtgagtgtgtgcatgtgtttaaaagtttatgaatatgtatatgtatatgtttgtgtggatatgtgcatatgtacctatgtttgcatgtgaaaaccacagaccaactttaagcatcttccttgaatatctttcaccttaattttgacatagagtctctcctgaatctgaagttcatggacttagctagattggctggcaggtgaactgcagggatctgctgtctgtctcccagtgtctctgtctcctaggacctcggtcttctggtttcttggtctcccggtgcctctgtctcccagtgcttctgtctcctggttcctctgtctcccaatgctgggttacagacacacactgctgtgcccagcttatttgtaagtgctggaggtccaggcttgggtttggccaattatacagcaggcactttataaaccaaactttctccctcaacctagaattttctttttaatcattgttgggcagcccccaagaacgtgaaataaaatccaacctctggaggcatggaacctggtcatcgtagtagattctgtcctctgggtaggcttgtgtgggaaaagacagaaagactaggttagtaaagggatggggacagagttagaggaataaggaaaaacactgggaggcaaagcccatggcaagcaagcaaaaacaagaaggctgaggacctcttgagtgtttttcctctctgttacttgcccagactttcttctgtctcctctggcttctggaacatctattcatactcttctctttggacatgtgaactaattttctctttagatggaaggataacagttggtatgcctagttacaatgagccctggtgagccagactttttattttaaaggtaaggtcattgtcataacatgcagtgctctgttgctgggcagaaataaaacgttaggcaaaatagtattgatgtgacagacacacagacttaagtactcagggacaaaagcagacaatgccttacttggggtgccgtctaatcaaattcaggcatgtgtgcagcctacaaagatgatcattgcattggacgacaattattaaagtggggtctttgttcagaagagtgtcaaagttagaattccgtgcagcattatgggtgtcattttgtaagagatggtgttgcttagaaatccccctggtccccctgctcttcttcaaatctaatctgtttgagttcacaggaaaaccaggcaccacacacagccagggaagtgcggggacaattaacacctacctctaagaaccctggtggcgattaataagatgccatgctgcagcagggtgtggttttatgtttcccacaataagacctgattaaaattggctgttgaggctcctcagattcctggtggtgtgaggcatgtccagccattggctgctgaccttcatgtttcccctaccaattctgtagccatttgctgatactcatcagggattctggtgtttcccgggggaagcatagtaaatcaatccctgaaaactcactggaataaattttattttgcagatcaaatatatttatcccactgctgactctgccttctaaccaaagtcagggtggtttcacagaagtggcctttccctttgtcaggtcacttttgcttgattcttctccacaggcatgacagacacttcacagatgggaaaactgctcttatcgtgacagtgacctgggcatactaccgaatccagccatgtctctttaatcctcctctaactctgtctgggagagtggcacaggcccaccagtgtcttccattggttttctaagcacttgaaatgtttgccaataatttctgtaggttttgatgtcttagcctagccatgtcaacaaaaagagaataaaaagaaaaattcctataaaataaagcaattttagtagtgctatttatttttctttcatttggagcaatcacaatttcaggtctcatcagcatttaaattgcataccaaatgaggttcttatttaaacacaaagaagtagacacacacagagcaacaccacacataacaaaacacagagagagacacacgcatggacgcacagacacacatatagaaatacatatatgcacacatgcatatatgtgaaaccaaggtctcaggatatttgattcttccttcttaacttaaaaaaaaaaaaaaccacagggacagcaattatttccaagcaatgcttcctgtatcaaatggtccctgccccctcctcctacttttaaagaactgggctttgggttgctgataatttcaggataaatgtttcgatccaatacaaagacatttcaaaggtaacagaaacagactggaagccctgacagctcctttctgaaggagggcgtatttctagatctattttatgacctaggaagtctcaggcccaaattaaaatttacccccccccattgtcaggatttggggatttagtatagacacaccttgtagttttggcagtgacctgtcacttggatggttgtcttcaaatactcctaatgctatttcagacaaaaaaaaaatgtctcattactgtgtgagtcgagagaagaaatgaactcacatatcatcagcatttctacctctctccctatgtcatccctgtcctcttgggaggcagttcagttcccaggggactgtaatgcccctgaaaattgacagtcacattctattataacatattttccccatttaataacatggcctaggtaatgattcataatcctcaaagggcctcctgccactgacagctgaactcgagtaattgagaacaccatgcaatttggcggtgactacacttttatggttggatcaagagttaaagcaacagtatatctggaaagactttcagtaaagtgacagcctccttgtgatatgttccaaatcagttttacacatgtacctcggtctgtgtggcctggagtggggttgtgagtgatgtgctgatttcattgcttgtaagtccattatagacagggacattttctctttttcatctctggaattttagtgtctggattatagggcataatcttggtatacaatatgctaaagcatcattttctctgccttgtcctatgtttcttgggaaaacaggctgtcagtatcatgactaccacattctctaagatctgtgtgagccctgggtggactaacgtgactgattcactcatgcagctttaatgtctacaactactttttcctactccctgctggtttcagttaggactccatggggcatctccacaaatgccagcatccatcagtctcagaaacacagctcaggtacaacccgagatagtagagatggctccacttgtcatttctcatggtcctcctcagagaaccacagcttggtctgaagctctcaatagacttttgtgctctgcctaaaagattctctcctcctcaccattggcagcacctcagaataaatatacaacttggcacttcagcccttatcaacttcaagatgtgccatctacatcattaggagtgtgtgtgtgtgtgtgtgtgtgtgtgtgtgtgtgtgtgcgtgtgcgtgtgtgtgttcatgtatgcttgtatgggtgcatgcccacatgcctagagtgtatgcataaaactgggatccatatcacatgtctcggatcattctccagtttgtttgtttattttggtttgtttttgtttttgttgttgttgttgttgttgtaacaaggtttgtcattgaacctggacctcactaattctgctggttggcttgcaaactccagggatccttgtgtcttcccttcccagacctgggattacagatatctgctgtcacccccagatttttacatatgtgctagggatcaagctcaggttctcatgcttgcatggcaaacactttacccactgagccatctcccagcccctaaagcctaatttgtttccttggtgtgttttcagaattggatgtaataatatatacagttatactaaaagccatctggtatatttcaatgagcactcagtaattaatagtatattcattcttctgagttagacgttggactatgtaattccataaatatgagttgtagcagacattaagcaactacctgtctggagtcatcatggagtccagcaaaggtcaacttgccagggagttggacgtgcatcaagttcaggctttggtatttgttgtgtgacagacttttcttggggagaggtaacacacaccaatctactcaccccagacatggaacccatgacagactgcaccaatatccaaatatcaagccagttctttttcctgtggtcactaacaggggcacgggtaaggtggacttacaaggatcaggggtaactcaaaagcagctatgtcactagaaagcccaccctaacatgggtgacaactccctaacactgcagccctgaggttctctacaattttctgacagctcctcagtccccacacctctctttctgcactgtggtgttcacagtctccaccccagtgactgttttctcccttcttcattgttgaggggggggcttgataattttccaagctctcttctttgcagataattgacctttcctgtacctctccttatcagcaaaggctcctgattctcctccttcctgggacagtgtttcaatttagagagaatgttgggattcataggaacatgccacaaaacaatattgactcctctatggctttagtaatggctcagctatcagagcctcatttccatccatggaatttcagtctccccaaagttacccagatacctcacaggataggaacaaggactgaagttggtgatacccgtggtcatataatctaacactgtgctagggctggggtctgtataaaagaacttgctgcatgggtgtgagcatctgagttctggttagaaagcaatagtccaatactgacacccagcactccacagcaagatgggaggcagaaacaggggaatccctgggagctaacaggccagtctggaagacaagaacaaaggacaatagaccctgtctcaaacagggtgggaagtgagggaggacctacactgtggtgtctgcatgcccacattcgcatgtcccaacatgcacaagcacacagaatattacacagagtgaggcacctctttactctaatgtcccattctcctgtgaagggtgacatgaagtagggcagcctgcatcttgtgttcacagtgggtaacaggctctgcaacatgcacagcatagaacacaaagcccagtgagagaaactggctttccacttccctcgagtactgaagaccactgttgctgaagtgaggaggtaagggggtaagtcaggtcttcccctgactctctacattgtaggctaagtctgcactctgctttttgcaggcaaggctatcaaaactggttttgcataccataataaagcaattcaactagagctagagaaatttttgttgacttgcatttgagatatgtttttaacttgcagtacaaagtttaatttggattccatttcccctgatgaggaagagcatcgccactgtaggaaaacctgacactcctttattcttgcaaggatggtaaaaaaattttctgggtcacaaaacaagcaggggagaaagaaatgaaggtgcatgcaagactcataaaataagcattcccctgtggtcattattagacagcttgcattaagaggatgtcagccccgggagcttcggccatctttccttctcaattttccttgtttctttgttcaggcttgcttctataacattctagaaagatctgctttgcccatatttccaaagtgcttggaagtgctgattagcaattatcaaacagcactgtagggcttcgggaccccaataataaatattactctacccaagagcccaattgtggtgtttcttaaatccactgtcagagggaaacagtagcaagagggcttgaatggccatggtgccgtgagagacattcaatctaagttatcaactaaacgtgttcctacctgtgtgaatatcccatgagtgtgtgccatagtccctcttctctaagaagttgtttcatgggagggatcaggttgcttaaataagaaactaataagttgttgactgtagattgaagatgagaaaaatcaatgtgaactaaagagtcctaggaaggttctcatatagaatgtcaactgggatgagcttcccagaacagaaaaggccaacattgtctgggtggtactctctgctcatcagcctgttggacctgtatgatctgtccatggcatcatgtgggattcactaggatgagggtccaggccaactctcccagaggccagcacctctcccctaacaatgtacttcattgagcactcaacacatagtgtcatgccaccaccggcattattagtcctcctatctcttatcctaaagagacccaggtggcgcaatagccacacttctgaaaggtagaagggctcccacaccaggaatatgtcctctgtctttcccagtagaattggttctaaacagaatgccataggagctaggaaacagctgtgaagtaggtggagaagaagagaaagaagagctggcagctcctcccccttgcttgtccattgcttcccccatttctgacactcaccccatccacctcctcttccttcagcaatccttctccctcattcgctcagcacctcttctcctgtcactccttagacatggatatcccacaaagttttctccttaacttcccacctccctctctcagacatatcacctctgtgcagatggctgtcaatcctgctctctccaagccagacctgggctctgctctgagctccagcctattctccaagctttcacagtcttctcaaacaactcaaacactgtgactgcatccctgtgaaaaccagccctctcttcaccttcttactcaccatttcaccagtgtttctatttccttgtgtgtcctgagcatcccactacaaatataaagcccactctcctccagcctccccaatggtgatacagtacttccaagatgttaatgatgatggttgcagtgtgtactagtgctttggggacccatctctccatcaacctcctgggatccagagcccctatgctaaaaggaaggaagggggatgcttgcatgtgtgagaacctggcaagagatggattgtaaatgtcaaaatttattgtgctgaggtgaaagaagaggaagaaagttaggaaggagatagaatcttatgtccatggcaatgggcaaaaaggatgtgcaatggaaaggcactgtgggtccgatgaagcctgtggtgtggacatacggagaggctgggaatcacatgaaagggattcagtcatgctttcccatctgttcagtggtgttaaattcttctaagaggcactcattccctcatatacacataggaaaatattcccaccacttcttttaaaaattattattattaaaaccagcagagtaaatccatagcatgttatagaagagcgtgaaataaaaactcacgttctctgggattgtaaatgccattaacatgtactaacttcacgtgaacttcattccattaccaccatcgtgttttcatctcaccattctccaggggaacactcatggctcattctagattttagaaagtagtaagaagtgcagaccctcttcctgtgggaggggacaggagaggtcagtggcagggaaagactgtcctttgactcctatgtcttatgtgcagtaaaaaaaaaaagggggggctgcttactttgtttcagaaatgaccaaaaaaaatttcccagccagatggctgtcagaaaacctcccagaaggtcaaaacatgaccaggtttactgcttgcttttgctcagctgatgagcaaagagctaccttgaagaggataaataaaaattattcttcaaaaacatacttacctctctctggccatggatagatggcttattttgaggtttttaacatttcttaatcattcaacaaatatttattgggcactgattatgctacaaggacataaccaggggctttgttcaggtgacctgagcccaagcacttttaggaaaaagtcatcatacaccgacctcctaggttgtccattaagtcctggggaaagggacagtttagcctcagaaggaagtacatacaggttgctgctgttttgctgtgggcagtggcgagggaagagaatggccttttgtttccttgtgcttcttttattcctatgatagctgagtgctggctcagggtgcaagatagagctggcactctctacacctttaaaattccaggtgtgcctctattgactgacacttggaagctgatcctgtggttagtacagaggaaactctcttctctatgagaaagacataaccctcagacttccagtgagtgctgtgtagctgcctggaagggcaatggcctactaggtgacacacatataattcatgacatatccataataatatattaaagcaacatgacatttatggttcagcctaaacctgaatagcagcaccaagggatcctagacactgtggctgcattgcctgttcttgggaaatagcccaagtgggagctgctcacacattcttgtcctattaccttcacctagcagcacagctttctttagctgatctctacaccatgagtttgaaggactccatttccctcactctctcagggatgtggggctgccttattcaaaagacccactttgctgcctttgcttagagatgatgtgtagttatgaggccctcagcagggaaggcattgaagataggtctccaaggcctagaatttctctttccatgtatgaatgccatagtacaaatacagtttctaaaatatattctaaatcactatggagtgaaatatgaatttgttatgggctctctaggagatctgaaaaccacacttaagagacattgacctatgctgccaggatttcctctttcttcttttttctttcttctttctttctttttttttttttggacagggtttctttgtaacagttgtgactgccctggaactagctctgtagaccagactggccttgaattcacagagatctgcctgtctctggctctcaagtgctgggattaaaagcatgcccaccactgtctgactcctcttttttatcatattgtctttaagcaggcaaataatagattattgatagacagatatatgatggatagatgacagattgatagatatatcaatagatagagaggtacatagatagatagatagatagatagatagatagatagatagatagatagatagatagacagatagtttcactgtgccaaatattttaataccaactcacttttccctgtgaaaatgcatatgatattcccctgaacggaataccacagagcctaagaatgcagaattcttcaccagagctccagctattgagttgcaaccccagggcttgtgtggggccagtcagtatcatggggcagctacagctatccctgtacctttttctttcagattgctgtgtggaaagcacctagcatcccagatctgtactcaacaaaaacagaatagatgaaggggtacaaaatagctcaccagtcaggtatagagcagacactggaatcccagcatttggaaagctaatgcaaaaggattgccaagcccagcctggttctgtatagaaagtcccaggtcctgtgttttaaataaataaataaataaatacataaataaataaaatctaatggaaaaacccccaaactatcccacttatgtaaaacaagcactttcttttaaaattaactaagcaaacacaatcacatctgttcttccagttctggtggctgtttgctttaaaatgtagtcgcctgttccatttggagtttcaagactatgtttttgcaaataacagtaggagattccctggggctccccatagcctgaaagttcttcataatttgaaggtggagagagacggatggagggagagacagacagacagacagacagacagacagacagacagacagagaacaatagttgtagaaaatatttaaggttgaatagtcccttgaaatggtgggtgtccacatggtctgtgatgtacatgatatgcttaagcaaagatgtcttacttataacagagcggtctacaagatcataaatactaatgccaaataaatgtgtgggggaggtgtacaacctcagttgatgtgagagaaatataagcaaccatatgatcctatttttttcctcatgaaactgttcttaaattataatgctctgggtcacccagggagtcaggaagttaggttctcatgctctgtgtaagaaagtaattatgtcagaggacatattgtcaatatatatcagatgttcatgagctttcacccagttatccttttgaaaatttgtcgttaatagtcaaagaatcacctacttaaatgggtgcattcaaattatattttaataaaccttttgaaatagttactaaagtgttactcattacagtgttattaataacaacagaaatggaaagtcctagtgtcaaccttctccacacttagaagaagaattcagtcatttctttttgtaagggacgctgtggtatagccattgttctcaaaatgggctgcccaaagatgtggcctcaaactcatctacaatgaaaatgtccactcttagatacaatattgtatctaagaccaggctgatcctagggatgaaagtctcggccgccttccaggtgatttagatagttgctggagtatagaagcccctcagaaaataaatgcaactgataaatgagtacatacagtggaacagggtggtttgaggtccatgtatttgaaaagcatatgaaaagcatgtacaagcatgcctgaaagaggcactgcaaggacacatgtgtacagcagagtcctttatcattttctgtacatccccaattttctgcaacgctttcagactaacccatagtaagtaaaacaaaatgtttataggaattcttgcccagtggaaactctggacattcagacatggaggaagcttttgcacacattctgaggaggcagagggaaggtggatgcctgctacccatcagttctatggggaggtgtttgtcaagacacggtttctctgtatagtcttggctgtcctagagtctgctctgtagaccagcctggaatgcaaaggtccacctgcctctgcctcctgagtacttggattaaaggtgaggttttcggcaccatgcccagccttatacaccatttatcttaagtatggtgcatccagccacccactgtcagatccagaatcttatggtttctgtgtcatgtgcaaaaatatggctttgtctactgtcacatacaagaaagaaaataaatgtaattttaaatgaaatgtagatggtgggttcggggtgtaggtcatgggagctcttggagtttctgtataccagggaagacagcagtttccatgtcaaataaaagacttcatctcttacctcagctgccaccatctaagcacatttcttctgtcattagaagtatttctagttggtcatcaggatggttttgtttctgagaatacggtttttatatatgtacatatatatatatgtatatatatatatcatgtatcacttatattatttatacttatgtacatataaataaagtttatacagacaaaggcagttggcataccagccattcccaggacaaaaaagttccatgactttgtagcatgggaaagaacctacagtgggcctgcatctactctctgtctctagctttcccgtgacagggaacaggaaaggaacacatatgttgtctggggctggcaattgccaatttttgcttgaaatgaagtgtatacttcaactgctgagatggcccaggtttggggagagatttgtatgcatcccttaaaactacagaaagttcaccacgtgcactcacggtgaaggaagtgcttgaagtttgcttggcaatgagagtgaggaagtcttggctacagccagcatttctaaagctggagctctgtaagcactgcacatccctggaggggatgatagggcacaggaggcctgcatgctgtggattacactaacccagacaggacaggacactggtggagctgcacatgcagggctcctcatggctgattgggaagaatcgtcatgttattaaacagtgccagaccttgaggtattttgcatcttgggcagcctagaagacaacctctccagattctctggttctgggtgcctgggttcaactagaagatccctgaagacaggatctttatcttccagaacccagaaagttactggaactcagtgggtgccagcactaggctccaaacattgctgggtgttttattagccctataaaaaaatgttggtttgtaccaagtagatttgccaagacttgcttttatgagcctcttatgaaagcaaaaaatataataaaaaagagtcaaactgattctgcatgaattagatatgttggtcaaaaaacaaaagaaatcggattgataacaaagacctcctctacagtcatggacacactcctctaaagtacagtcatggacacactcctctacggtacagacatggacacacacctctacagtacagtcatggacacactcctctacagtacagtcatggacacactcctcaagtttatttttcttctcttaccaaatggaaaaaatgggacctagaatgccttaagatatgaaactggatgggatgcagcagtgtaatagaatgaggatgttttgagggtcataaaggcacatttcaagctactgattttggcatggacctcttagaagacctaactctctttatttgcaaattaaaggcaaacattgtaatgactgtgatttaagagacaggacaagctaggaaatataatttggagactaaaatgtgagaccttgggtattttacatgaagggtgaagcaaacatgagcactctgcttgttgaacgcagctcaggacacagcacaactgaatgaggacattatgatcttaaacaaaatacacaatcaactcagtagtcacatttttattttctcaaattcttctttgacaaataaaccaatgtctcaaaattatttagaaagtcagctttgcaaccccaaaacaattccactgtcaacccccttacacactgcctttctcagattccaagactccattgcccatctcacagactcaaaagtgaacctattaagagactaaaaaatatctccaaggttctgttcaaggagccacaccaggagggagtgaggtttatgagatgaggtaatagagtacaaatagaaaagcatcctgagtaactcttccctaagatgcctattgcttctgtgattgatttgtgtgggggaggctgatgaagttgaattccctcgcctttcccaccacgttcctactgcttcagggtctgaatgttccagtttgcagtacacaggcatcttctctgagactggtccccagaaacgctgctcactttgattagcaacacagtttccagagactttccttgatgtcattcttacgtactgtgcacccaagacattgtattatggaaaatttatcccccccagcagaaattggggtcactggtgttgaggaaatggtactaggcatgtcaagttaccccacagctatttgtcaaaacttgaaagtgatgaatgggtgagtattcacattccagcctctactaggagttgtgaagcccgagtcaaaccacacccattcctggattttgtgtgtgcacctactgtgtagaaagtagagagctatatagctagtcattgtttttctgagtcttataaaaagtctctaatgcgtgaaatattagttcctaccttagaagttggagaacaaagatataggtcaaccatggtatgtacccaaccgtcatagttggggttgaatacagaaatcagacatggagtcttattggcaaaccagtttaaaaaaatgactttaggcctgaggatatagttaacctgatagagtgttttcctaatttgcatgaaggcctgagttttattcccagaattggtggtatacactggcagtctcatccaagaactagggaggtggaggcaggaggatcagaaatgaaaggtcatcctcatgtacatagtgaattcaaggcctatctgaggtacatgagactgtatctcaaaatatatgtgtatagatgtgggactggggaggaagcagataatggagacggcaacctgaaggatgactgaagagagtaaatcagagagtgaaccccagccttgatgtaaatagctctgtgtggtcctatgaacgtaagcatcccagggattttataggctctgaagcccctgttgcttctgtctggcttcctgctgnnnnnnnnnnnnnnnnnnnnnnnnnncaagcacttatcgatttcttccaataggaagaatgtgctgcagtaggcaggagcgatacaaagcttattaaaacatacatctttatcgaattcaaggcaacaaacactacatgtcatgcaatcaattacaatacaccaagaatgtgatattaactcaaataaagaggatctggtagagagcagagactggaggaagtgagctccaagctccaagcctcagcaccaccacttctgagaacttagaagcaattcaggttttggggtttgctgtagagatggggctggcccagggctttgcccagccctcctataggtaggatactccctgcatcttgagatgcatagatgaagatagggctaggagctgagcatggcttcatagaaggcaaggtaagggacttaacagtcaatcagcctggggaggtctttgcagctgatttaacaataggctcttgctgtggaggtctcacacagggttcccagctaagaggaacccacttggcagtagctgtgtaacttaaaggcaatgagaaacaaacacaaactctgaccacaggtctctcctcctgctcacgcgtctactgttttttccattctggtttctatgacaacaggtctgatacaacttgtatttatgaaaatcacattaatttcactaaagcctcagggattccatgtaaatcaatattttccaaatctgtggatcaagaggccttcaacttcttacaaacaggaaaagaaagaagaactttgctcccaaagtgactgggaagggtcagaggcaccccccacacacacacccttccttctactacgggttaccaatccttgtaaagcaggcttctttttcctaacaagccaaatcttgtttccattcctgaaagggaggcctgggagaacaaagccacgcttacttctctccaccatgctctttgtgcctggtgcttttgtgcttcagatagctcttgtaagtaaattggagcacacaaggagagtagagttggaggcagcatgcctctgttgccatcctcccgtcactctggtgtctgttaacagatccactgtgaaaataaaagataaactccagggcaggggaaatgatagctcaggcagaaacatacttgcaagagtagtcagaagtaccagaacccatgtaataaaaaagccctgcatctaggcatgtgcctgcaatcccagcactggtgaggcagaggcaggtggacacttggggtttgctggcaagttccaggacagtgaggcataacttctaatgtctgttttctaacttctacacacagacacaagcacatacatccacatgtgtgtgcatacacacacacacacacacacacacacacacacacacacacacacacacacacagacgtgtgtgtgcatgctaagtaagtaaataaataaaataagcttcataattaggactctccttcaggtaaccaggacatttgctgggatgttggggacagtctctcctacccacagccagtttccataagcatagagagtagagattctggaggctctagattcttcctagcagcttctccatgaactgagctttgagagcattcatgattgttctggacttcttagtgtcacaatgggaaatataggcatatggcccaacctggggcagcctcatgttggcagagtctacctttgtgcattggtccagtcatccaagaatgagcaaaggcaatctggagaaagatacctggaccatccactgtgttaggaaagccaatacatgccaacaagactataatgatcgggactgcttcctctgtaataaactgattttttttcaccagcccacagcatgtctctctgtgtcccctctttgtctgtgtaatccattttaagtaattgtcatattctttcaggcaaacactttctgcttaggctcgtcttcccccacaggccttggataccttgaaaacaggaaatagaatttatacttcttttgaaaacccaaaccacagccttggaagcacaataggtaattctccttgaactgaattaaagagggatgggagacaagaattagggaccaccctccctgaagctcaaaactgggaaatttagggcaaaaggaaagtgggagggaggggaggagggagacagatgaccttaactcggcaggcactgagtgtgtggaaattattccacacaaatgccacgtgtgcagcatctgagagtttctcctctctggagcctgtctactcacagcagtctttgcacacaagtcaggtctgtctacacctaatctctgtgcctaatgtgatatagagacagggtgaggtagaaatgaataaagaaatacaactgagggggttggagaaatggctcagtatttaagagcaccagctgttcgtccagggacctgggttcaattcccagcacccacacagcagcttacaactccagttccaaggaatctgatactttcacgccaaaacacatataaaataaagttaaataaattattaaaatatatatgaagtgagacttttttataaaaaaaagaacgaaagaaaggaagaaagaaagaaggaaagaaagaaagaaagaaagaaagaaagagcattgcttccaagaatcaaattttctattccaagatcttttaaaaagcagctgtttgtagtgagttctggacattctagatacatacgttgttctctccggttgacaagaaagggaatgaggagagacagctgagcatgttttagcaaagctcgaaggtttgtcatgaaagttcacatcacttactgtacctccaccccactggtggtggccgtggggtgataaacaagactctgtgtgtgtgtgtgtgtgtgtgtgtgtgtgtgtgtgtgagggcagctgtatccactcatggttagatctgtgtgagatgagggtgttaggaaaatgcttgcagttcttgctttagataagacaggcagtccctccctgctctcctggtggcacttctcccagtaactgtggctctgaaccattcactcctagcattttgaaactgcactggattctccaaacaccagcttcaaaagacctacaaaacaattttatcagtcttttccttagagtcttcccttctagcactggcttcctcaactgaatcacggaagaactgactggaaagattaaatcctatcccccctgctgcttgctcttcgctcattctgtgtcgctctctgccttgcctgccgattgagacacggctgtggacttttactaccaacccctgtaattacagagtccacccaccactataagccagaaatggagccaaaagaacaacaagtttaggagtctgttatgttttgtttgtgttgcctcataataccaaagttccagcccagagtgaagcatgatctgaagagaacgggcttgggtccactgataatttgccttttggttccaacaaaaaaggtagagctgctgttgtgatttgatcttggctttttggggtaagcagtaagcacccttcacctcccctggttaaactcttaaggtggttttctcaaagtgattaatgtgtcctcaagtcacccctgtgaggagactgagtatctttgtttttcaagctggaaaaaatgaaacagaaagcttaggcaattgcccactctgctgggatggaagcaggaggagtcacagggcgcccagatcctcagggtggctcggagggcgttcttgtccggtgcttcttgggggcagtgacatgcagccactcagggggtatcttccgaggtgccttttccctggcagacagttacagcaagtgaccttcagctaagctgtggaaagtctaagtgactaatttaatgagccttcgctgtgtgataggaggaagagacctgggcaagggagtagctcaagccatgggccatgaaggagtgctgagggtgagaagagcacccaagaggtcagaggaaagtgggcgcctctgtgtggccaggaaagggcctgagcatgtggacatatggaagccctgtgtgacaggagaaaagtgtgtgagccaagaggagcatttcctgtcgaagactggcatggtgccaattcttccaggagctggaaataggaacagtggggggcggtcaacgcaaccctactcctctgcaggttttacaaagccttgaaggcgcttgttatgtccgatcctccaagctcatttatgtgctgcattttctcagtgcacaggggccacggtgccatgatggccctgactgacatacatcacaacagcctctccacccttgcaatccttctgcctagcagggaggttagaaatgttaaaactggcgtttgtttgccaggcctttgcctctccatttacatcaagagagaatccgagagagcaggaggaggtggagatcacatgattcttctgctctccctggctcatagaagccattacctgccaggaagcatttgtcactggatagctgaatccacacagagcatgtttggcagcatggaagacaactgcacttactggaccagaatgctctaactagccagagttcctcctcatgttttcttattagacttgtgaagctgtgaagcaagtggtaccgtctggaggaaaaacgcagggcagtgagtgctgggagtaaagtctataaagttcttgtcacacctcgtgaagatctgtgtttaaccccgagcagagcattagtgtgtacctgtaatctcagcaccaaggatccctgaggtttactagacagccagcctagcataattagggagttctatgcttggtgacagaccctgtctcaaaaaactaaaagggaaaggaactgaacatgactaatatgtcaacctctgtcctccccgccttttgcaagtatgcatgtacacacacacacacacacacacacacacacgaaaacaaaaatggctctaagaaattcataatgtttgatagcagaaaaagctttgcagaagcaactagaaggaaactctggatcctgtgggcagttccagagcatttctttgtaggaatctaatccctgccgccatctgctgtccccccatcctccatctgacagacaggaggaccactctatgtcacagtttgtaagggagcgtgttaaagatcacctttccaatcacaccattcataaaataaaaatctaagatggcaaatatatcctggagtcccaactccaagcatccgtgtaagagtccccagtgagaaagggagggtcagggtccagcactcttctagcaggatcaatctaggagccaaagggtcacagggtcaccactgctagggcctcacagagaatagcagtaagcctcaggagtggagacagctcatttcatctcatgtttgtcaaaagaggttttttttcttccccctgaggaagctgcagccttgtgtttgtgttctcatgtgtaatcttgaattactatgtaccattcactgaaggactacactgtgactgactgtcctggatcactctctccacaaccccagggttaggcaggcgttatgagagctcctgggactgaactaagccgagttacatcctcaccaaacaatactggaaagactttgttgttgtctggtgtctcagagacttctgtcctgttttcctaagtattcattttccaagtcagcacaggcaataagaacaaaaccggatgtgcagatgaagagcaacagagggctggaagctattgtgtttcttggagtgaaccttgcagtggagtctggggatgtttgtatgaacagctatgttgcccacaagtctatgtgctgaggagtcatcacacccatgttactggttgtaactccaaagcctgatcaggagccagccaattatgttctctgcagggtatgtgaaaacttgttagaaatgcaaattttcaggcctcccccaagtcctactgaactgggacttctgggggcataggtctagtactctctgctcaccctaagtaatgtttcattgaagtcattaaagtgggtttggctcactgtgttacattttgcctttgctagtgtgggaagaccagatgtgcaaagtcaaggaagtgacagactgaactcaagtctgttgcaaggcgttgttctaaatgctatgagtgagctgtccccttattccttgaggcaatccagcaatatggttactatttttggctttcttttatagatgaagaaactaaaacacaaagctaatacttcacttgtctctgatgagaaatcttagaaggttccaaaaagtttattaaaattcaatgtaacacttttaaaaattagaggtagggctaacaaacccatggtactccaaacatccaatgtgagaggggacgacgccatataggtggctttgttgtaatagggtgccaggtgaagttagttacaaagaaataaaactcaaatccaagcaggttaagtccacaaccttgtcctgtgcagtgcactctaaatcttctgctagttaatactgcttcatgtgatgataggaaatggaaagcatgggcctggatggaagcaccatttgagactaagaggtgccttgttgttctaaacccattgtgaactcatgaaaaaaaatctaaaaacagaagcagaaaatccagaaagtgcctgaacttcaagggcagcttcccagcactgcctccaagctttctgtctcttactgaaaggcaagcagagagagatacaggaaaagagagggacaggcagagagagatagagatagagatagatagagagagagagagagagagagagagagagagagagagagagagaagcaggcagtcaagctgcttgtcttggggacctatcgctaagggctggtcacctagaatgccctgacatgttgagactacattgttaagctacattggtattcccccagcaaaactgctatcctcctggacccaatcagcatgctgtgaacatgagctctccttgactaaaaacagtgcaagttcctgctgcaccagtcaagatgcttccttgtttcacactaagtgacttaaagaatatttctgattagcatgctcatgtgtcaggaaactgacatgaattttataatgcagggaggggaagatggacacgttcatggctaaccccacattccctctgtttagcaggaaaaggggacagaatgtaattgtttacctgggatgtttgcaggcaatgtgctatgtgctatttacagtgagtggggactgtaaagtttatgtcacaggcatttggacttttgagttggctgtttggttttctgttgtatatgtttgggaagctaaaggagttttgctggaaatgtttcttagattcatcaatggaagtaatttgttaggtattaacaaggaaatgtagacagaatctgtgtgtgtgtgtgtgtgtgtgtgtgtgtgtgtgtgtgtgtgtgtgtgtgcatgtatgtcaggtccaaaagaaactcaggacaaatggctatctgtggtgactatgagcatgctggtatcctggctctcctgacccctacccccaccctaaatgtcttcatctcatgagattcctttccccagctttgcattcctatataaccctgccatttctcccatgtgctctctctctctctctctctctctctctctctctctctctctctctctttctctctctcttcctctcttgctcctcacacacccttcctctcacggccctgtccatgtttagtctactactttctctccgttttcaggactcttccagatgcctctggctgtgctctctgtcatatctagaataaaaaccttcccctcaaccataccttgaagcagtcacatcctcactttatacatctggtgccaacagacgaagtcttactatgtcgctctagccaggaacttgctgtgtacagcatgctggccttgaactcaaagagatccatctgtgtcttggtgctgggatcagaggtgtgtgacactatgctcagcttcttcctctactgataataacacacagatttcttgcctccacatattacatacaaacatctttctttcaataattgatcctagaggtatggctggagcagctactggataaaagtatgaaggttaattacatgtgttagctactctgcccttctggggctttcaccaccttaacaggaaaggtagctgataactatgctacacaatacgatggactgagatggcgctgtggtagtatctaagagtctccaagagagcatttcggcccagcctagcagatccctgagataagggcaagaagaacaagtggcccaagctgggcaaagccagggagcccagcacattgtgaaaagacaagtgtcctattagcctggaaagaatggcaatttgatgagggaattttggtgtgccttcagtgggcatcaaaaagcagctttgtgtttcacagaggacaaagcagagctcagcttcaaagccatgaatttcaggctttcatctgaactcaaatcaccaaagatttgtaaagtccaggaacagattcagtgactgtgagtcagctttccattactgtaacaaatgcctgagttcaccttacacagagaggggtttctgctcacaccccttcaagttttgcatcccgttactttgggctagtgtcagaacacctttacaacaacctgcaggagagaagaagatggccaggaagtaaaagagaatgaaaaaaagagtagagatagggtcccatgcaatcctttaagaccacatcctcagtggcctaaagacttttcacaaggttgatcttttactaccttctagtagagtggagggcaaccaagtaggcctttgacacgggaccttcagagacactcaatccaaagtatagctttcagccttggtcctcaaggtttcatgtctgtctctccatgcaaactgtgtgcagtctagtcctaagaggtcaccagagtcctaactgtgtcagcactgctccagactccggccgggtaccagacacagggtgtccaattgcaggcatcacactaggaagagaaaacagagcagatagtacatcccaatgctcccattcctgcatctggggcctactgcagcagaatgtggcattcagggacacacctgccttttacctttgctagttgccacccacacaggctgttcctgcagctcttcctggcagatgctcttccttgttgacttagtaacttcccaacacgggaatcactggcctctgcttgccttgtcagctggacagatgaacaggacacagaagaacacttttcttttgtttttggttttgtttctggaatcgggatcttactatggagttctgcctatcctggaactagctatatagaccaggatagtctcaaattcacagagatccacctgcatctgactccccagtactgggaataaagtctgtaccaccatgtctgcccagaactcttttcctgattctccatgtttgaaagaaatctgtgtttttacacctttaagctttgccaggtcaggcagctttccttgactggcatgtgactgcagcagccccgacctttgatgaaactctctgcaagctccttctctagccaaaatgcaggtttttttccaaattcttgttttaaaccaatcacaaagggtttttccatgttgttaggtaactagtgatagccaagaaccatttctcaggcaccagtgaaaagttagtctgcttcctggtgctataacaaatgcctgagataattaacttacgagcagaaaaaattccttttggttacagtttggaaatttagtccatgaccagttggctctgctgctttggactattggtggcatataaggtttggggtagtgaggtagtgggcctactctccccttccaggggcacacatccagtgacctgaaaacttcctacaagttccaactccctctcaaagttccacatgccgcctgtaacgcagggtgctctggaggacacctaagatccaaccattgtagtcagtccaggaagggacctaaaatccgtccccttgtctcagatgctcataggtgatgccagtaagcagggaagctttcagagacagaataagttagaatggggggccactgtgaggcaggggttacctagtgacctgacatgtgcataacaggcctgaacttatgtgctgggaggagagctgaaggaagcctagcagtcccagtttctgacttaatatggcttgtataggatgtgggcatggttgcagggaggattacacacctaactccctgtgttcagtcatcctgcgaagtcccttggtttcaaagctgtatttcctggcttgtgtcttgctgctgctcctgcatgaaatagtaatgtcattgtccatcccctgaccaaacggcattcgcacaactctagtaactcaagtcaagtgctgtttctcaccagaaatcttccctggtgctttgcccaccacctaaccctgcactgggttaagcatcagcaagctgccatggcatcttgtaaggtctcctattagagtatggtatggtcccatcacccagtatctgtatctcagagcttcctgaaaggacttactttatatgttttggactccgctgttcccacattagaagaaactcaacaataatctactgagtgaatggctaaagggtgagaaagagagaagactgtctgctatggtactggtgacttctatttcctcattgctgatgatagagcaaaacagaacatgtttttggatgggggcttaattgcatttggtgtatggtagtgtgaaggagccaagtacccatatgaagaagtcagataagtgttcaacaacttagaagacagccctgtaatgccttcagagttacctgcataaaggtaacagttacaatcatggcagaggaacagataaaaacagaaagataaacaggcaaagccaaggtgacacaaaggaagagagcagcagagaggcagaagcacaggaaggacatagagaactgagacacacataaagcccgatgaggcaaaaatctccttcagtttggaagacctcctgtgatatcattgtcaagacaatgtcaaaagtgtgatcttactcatggatgaccttcgaagcattcaagaggtcaagaagaccctaaaaagaagaaatttgagatgttctgctttaagagttaggcctcggtataagatctgaattaaaactccacttcatatccatgttccgaaggtcttggttttactcttctagcccgggaatagaattccattcataaaaatgtaagtggacctaaaggttggttccaattcttccagcttttgttttccaaaccacttcataaaataatctgtcgtttgtcttacagactcatgtcacctcatatagacagacagaatgaccaagatcaacacatacacagacacacacagttttatacctttttatacatggtagactttgtacatttgaagaattgtaagacatctcagacaaggacattttcctacttcaaatctgacccctgtatcattgataacagtgtgttaaacagaaaggaatattcaagcttagtcttgggcacaccctcaattcatactgagttggcacctgcaagaccttcaaaatgtaggatcatgttaggcattgattctttgttgccctgtgaatcctgccaacagcctcctagtgaattttctacgtttacttcacttagaggataatgttttgcctcaaaatactgttggaaaatctcagagctgcattcctaacaaaagcaacccccccattcatctgtaacaaccccccaagaaaatccttcatatgaatgaatagaacaattcttcatgcccacagcagacaaacagcagacagcccaagtcaagtaagactgaggggaagaagtaacagggacatgatttgttcttcataattacacattcagggagaaaggagtggagaagaaagttccttttaacgtgcctgggcatgacagatgaggtgttctcaccaaagctgtgcctgagggatgaatgtgccgcagccttgtgagagatgtttttctctggaatgctggagataaacacccagcattttactcctcattttcattgcgcttagaggcctttacagttttctgtgagtggcaggtgataggagaagagtgcaccaggccttctggggcctgcagcaaaagcaatcctttcttcaagacgtgggacttgagcacttcagacacatttaatcctagccaacactacccccagcatatgtacatgatagagttagaaagaagactagagtgcaaaaacctacttcatctctaagcttatcttctccttgtaaccagtttgcttaagtgcaatatttactcaaggattgtttaagcaaaaaccaaggaaccaaagctcaactggctttatttcttctctgatgtggaaaagataaacaatttttttaaacctaaaacagtctctgctaatggagaagctgaatccaaaagattcttacttgaactatggaaggcataaatcatatctgtgatttttccttctaaaaatgaaaccattggtgctggagtgatggttcagtggcaaagagtatatactgctcttgcagaggccctgaggtaagttctcagcacaatgccaggcaactcgcaaccttctgtaactccatctccaggggagctgataccctctttcggcttccaaggtccctgcactcctacatacccctcaacacacacatatgcacataattaaaaacaaaataagccattgttttaaagaaactaatgatacagtttatacaaacctgattggaggaggaaccagtgagttcacaaatcatttcctaagtccacgacgaatttgaggataagagaatggaataactgttaaatataataattgtaaaatatataaatcaagtcataccatctacttttatttctctacattactgtcctgtgaggcccttgcttatatcatctgccatgtaagataaacccataaacagaccttctgagatttgagaacacctagagataacaattttatacaacagaaagcactacaaagatgggttagctttgcagtacagattctgttgtttctttggttgttcgtgtaaacacttagttattgcaattgtttttaagttttatacttaaaatgagccatatactctgagtttaaattatatgacgatacaatgaatttgatactaaatcttaagtgaatattctataaatgcatttttttgagacaggatctcactttgcagcttaggccaatcccctacctcagacttcatggtggtggaaatctggtcatgcctagcttaacataaggcagagtctaatacattcaaacctttgcctcacagtgaggttaagagaatggactggaaactgtattttatttgattaaacagagtatcaccatgtctgtgtgtgacaaactgctcactccaatcttccccattaccatgaaagcgtatagttctaaaggtccttacacatcatgattttatggtgctagcccatgtgtttgctaagactgggtgtttgagggttgagagcaggtgacaaatggaagagacacaaccagaacccacaagtcctgactcccagacaagtgctgtttctaccatgccaggcagttgaaaattcccagccttatcacatgcttctcatcttttccctttaaaaaaaaaggaaaaagaaaagaaatcacaaagcagcatgatgctatctggcttgtcactgtcaatatctctgtatgtgagtgaggaggagtaagagagagaaaaatgttcctgtagatatttttgcagagataggatagtgcttggttcacatccaaagatcttgagcaattaatgagactattgtccacaagttggtgcagggtttagcaatgagatggtagctatttggctgcttctggtcctgctcaaggtctccagggacaaaacaggaaacagggccttgttctggccaaagctggattcctgtcctggccctggacaaaaatggcatctcctagcctccactgtagcatgccgaaaatgagggaaatgaccactattcccctagttctcagacctgctctaaggatccagtgaggaatgtgtgttcaaatttcttgaaaaccatttgtatcaaaagccacaagaatgtcaaggactgttattaatatggttagtagagcactgagaaatgatggaattaaaggaatgccttgtaccaaaagttgaccaggggcaatttctatgcttattctctgagtctaaaaagcacatttatacaaggtagtaatgattgtagaagtgtgtgtgtgtgtgtgtgtgtacacctgtgcacatggaagccagagattgatgtcaagtgtctttctgaatcacttcttcttcttactaattgagcagggtcttccactgaacctggggctggccaatgagccctggagatcctcctgtgctgacttcctactctgagattacagctacacacagccacagcaggctttttacctgcatgctgggtctgtagacttgcagagcaagaactgcaccaactaaaccacctcctcagcccccaagtattagaattttgagcagccactttcccagtttctttgtgtttaaacagggtcaaattagaacagcaaaagcaagttactgaccccacagaagcaattactgtctcccaaattaccagatacaagtggaggatccctgcagctttgaccatacatcactataaacattctcacagtctctacaaccataatggtatttgctgagagtgagatgaccaaggactgacatgtttttctgtttcttgtttgaggactgaccatccgagtcttccctgagtcgtggatttcttgattgtccaggaaggtttttgcaattagtcatatttagctgaggcatattatccagctacaggaagaatcccatttgtcagcagttttaaactttgccaaataaaggctcattggcgaatggtggtgaactctgctaatggcccaactttagaaaacacacaccctgctgagctgtattcaagccatggttctattgaataaaagagaacaacaatgcctgctttcaaccactagagaccctttgcattccaataaaagtttaaattaatgttttaaaaggttattgctattttttcccatttagctgccatcatttatgagttgtatttagacaaggccctacgttattttactatttccttctgcacaaaaacaagtgtttgattacattagctcatcagtgtctggctttcattagacaaacctgaaataccctattattaagattaaacaaaaaaattgttgctttcttattcaaaacctattattttgaggttactctggccagaggaaatgacgagacgtttgtacaaaacctgacctaaagatgctccaagaggagtagctcagccgcctctgcactgacaggggttgctctttcctgggatggtggaaaagaggtggcccttcacatctttggaatttgcggttcctgctgtgttctgaaagggatttgaaaggggaaagtatccttctgctttgtaatgccagcaacattgtgaggcgtccctgaagctgcaatagagcagcacttggacctgagggttctaggatctgacaactccctgtcacactccttgtcactttggcttagcctgttgtcctctcagtctcattttcaaaccaaaacaggagcaagtggtgcacactgatcaagtcacatggacaaatgggcaacagagcgtggagacgactttcatagaccaaggcttccctaatggtcgcaccatacttgtggtcacttcagcctcttcagatttctcccaggggtactagaaattctctaggggatggggttggagagatggctcagcagttaagatcccttgttgcttttgcagaagacctggctttgattacaagctcctacttggcagcttacagccctctgtaactccagtcctaaggaatcccatgccttcttctgtactcagaaggcaccaggcacatatgtaatacacagacatatatgcaggcaaaacaacacaaatacacataaaattaattaattaattaattagaaaagaaattatctaggggaatttcatatgtgatggctaacacttttcacttgacacaacctagaatctcttgggagtatcaatgagggactatctacattgacttggttgtgggcagaaggtcttaaactctgtaagagtggagacatttgagctgcccataagggagtgaggaagtgaacatgtatgccttcatctctcctgccttgaccgtgggtgtgatgtgactggctaactcttatatttttggttgtgagcttagcctttaatggcggagccatctctccagcccaatggcctgctaacttaagctgctgatgctatgactgctcagaaataataaccttcttgttgccagagcatttcataacagcaagagaaattaaactagggcaggcctttacctctgaactatcttatgagtcttttgtagcttagacatcatcgctccaagagacataccccagcataccaaagagggagcaggtacccatcctgtgtactggacactgcaatcctatcacactggttacctatttgttagtttcccctgtacagcatgagatatataatgtcaagttgtcaattgcatcttttcactgtagcatttgccagaaccacaatacatgctaaagtggtaggccttgactaaatgtttattaagtgaatatctcatcaggctagctgtctcaattttcccatcacactggccagcttcctcgcaacctgctggaagttgacgtgatggtggtaccatcctgcatctacagaggcagctccattggtggtacaatagtgtccactaaggtcaagagcctcctcaggctctctgttgaatccccaaattccaatacttcatgattgtatttctttgcttatcttagctcagtgaccttggactccaaattcaagaatcaggcatggcccttagacagtgggaagagagacagaacgaaagtcaaggtcactgtgttttcctttctctaccatagtggctcagactgtaccctggtcctcttctcaagaaacaagattcttctgggaatgttgtttgcccttccccttaaaatggattgtcagccctattctgagggtaagcacaatcaaagttctaccaagagcttctagtgtaggatgaagggtgtgagaggagcttgttgctcgtagacaaatttattccctggtgctttcagggaaatacttagtctcctagcatgattgtcaagtaaaaccagggcattccactaaacttaaatgccttagaaacaacaaagatttgttgttgttcatgtatgaatgtcccaaatacttcatggtacatggtatttttaaaaatcacatattaacccaaaactaaggacacaccaggtgataatgttgttgttattaccccatagtcccacatattagtattagtaatgcttcagtaactagccataaaaatataaatcatcaatagtatggtaaaatggagccaaacgttacatgattcatttctctgaaattcaaattttgctgggcactgtgtattttcatccgttgcatctgtaagtactagctctgagtcagaagtcctgaacagtgtgtccctgcagttattagggtggcctttcatggaatagatggagccaggcaagctcatttgacctctttagcccacaggcttgaccagtcctgactgtcactgcattagcaggttctggactctccatgaccatatgtggatcttgaatactgaaagctgtcagtcaccagagaggaaatgcaactactgtagcattactctagcaccagcaactaggtacaggaggagacaggttcaggccagatggactacacagtgaatgagactctggctcaaacagaaatcaaactacacaaagtgaagaaaattccaggaagacccaaactcttgtctcctgcaggccattttctcataactaatggcctgttcctcatcagaagtgtggtatccatggtttcccagtgtcatttggttctgttctacctgggtttgttttaagctttctgaggactgaggaagtgagaagaaaacataatttctcaacagtggtgaaattagcctaaggcaaaaatctggaaattaattgtcctgaatgggatagactcttacgaatttctctctcttctggctttttagtttaccaggagtctaaatggaggcccgcataaaccatgccagtgcccaggcactcgtaacaaaaccaaaggaaataaagggtaatgaagtcatccatggaagcaggaagcaattaagcacatgaaaaaaagaagcatcccccatgataggcttcagagcaactcactgaggtctaggaacgtgttgttctcaaggtttctcagtccgtttttctagctttctacagcttccttaattcaatagcttttcattttaaaattatagaactgtgcagtcattacctgcccacacacccaggtgtttattgtgttgtagagtccatgtaggtggaaagatgggactaggcagtagagaaaaggatttcaaaggtccttccggtctgcttctgcttgaacagttggtattatctggtgtggctctgggaaatcaatcttctgggctgtcttctaatataaataaaacaataaataaatgattgtgtaccaataaaaggaagaagtatcagaagaaattgtgttcccagctgtcaagtcacctttttttatgaatcaaaagtcttgtggttcttgacaaagagtgtcacatggttggagagttgttgtttttgttgttgttgttgttgttttttgtcttcctcatacacccaagagaaaggaaatacttgagtccaatatttacaggagtgatcattgttagatgaattatccaaacacatgttgtctaataaatatgatatctatataaagttatgctgttcacaagtgcacatactgtcttggttagtttcaactgtcaccgcctagagcagtgcttctcagccttcctaatactgtgattctttaatacagttcctcatgttgtggtgacccccaaccataaaatcattttgctgctacctcataaccataattttgctattgttatgaatcataacgtaaatatctgatatgcaggctatccgatattcaatccttgtggatggtttgtttgaccccaaaaggagctgagacccacatgttgagaaccagtggcctagagcaatctgggagaaactgtgtagactgtgaacttgtctgcgtggagggtgtcttaattataaactcaggtgagagagcctagcctgctgtgggcaatgtcagacctaggcaggttgttctgagctgtataagaaagctacctgagtataaacttgtcttccagaaagctagcaaacatccttcatggttcctgctgtatctttggctgtgaataagttccttgtttgaaggtaatactgtaaggaatagcaagcaggcctgccttcaaattcctgtcttgacttccttcagttcagttcctgtcttgacttccttcaacttccttacagttgaactgtaccctgtatgtttgctaggttgctttgagtcagggtgtttttattaaagcagcggagtggatgccagattatatgtggagaatagttttattagtacaaggggctggtatatgttccttgtgagagtctgaacatcaagtaccatcctagatgctaaaagctgcaaaatttttaaagaactcttttcaagaatattgaaattctccatatgaaaaggtgtaattcttgaaaggttcaggcattatgctggcctgcccctgttacctgatgaaacaggcagtaccctggtcagcccaaggtaacatgggaactaagtctacacacaggtgcagaggatccctttgaaagataagtccctgcccctttacgctctctctctctctctctctctgttcccgttctctctgtttctctgtctctctgtttctctgtgtgctctgttcccttctctgtttcccgctctgtctctctatggcgaccggccatggcggtcagccatttaccctgttcctcttcttagtctccccattctgctggcccttataataaacttatagtcaatatgtctgtctcggcaatttctcttttctgccttttaaacaaaacaataacaattcttccatattagaatgtgaccactattgctatcagcattttgttgtagaggatagtattcttcttacttcatggttattgagaataggtctttgtaaatgtaaggaacatggccagataactagagaactaaaatgggatgaacattctagccagggttgaaaagactgctcagcagttaagagtacttgctgctcatgcagaagacccaggtttgattcccagtatctacatccagggctcacaaccacctataattccaggtccaaggaattctatgcttcttctgtcctctgtggacacctgaatgcaagcagtgcacatacataaatgttcaggtacacatacacattaaataaataaataaataaataaataaataaataaattgcaaacattttaagtagattcatggttgaggggttcatacaacttgctggtctcaagaggaaaccttttttgaggtccttctcagactgtggtccagaggttcttttggctcatgtgtttccaaatgagaatatgttatgaactcaagctctggtgggtcccctagaaagcactattcaccattctggggttctcaccttctcctgggtgctggatacctacttaggggtagggcaatcaagaagagaacagacacatctccattagcaaccattaaagccgagcgctctgcaatggatttttcataaattctctgagtagcttggttgaacacaagacaaagagcagccactgtgtgccctcttcacagacccatagataacttcctagaccatggcccttcaacaggaaaacaacaagacccagtgcaaggaccctaacatgagctcaggtggctgcagggaaatcagtgatcaaaaagcttaacagagaaacatgtttctgtgcacttggtattcaatagaatacggatttagggatttttgtttgtttagggagtgttgttattttttgtttgtttgtctcatactttgctttactttaccacttggaatgtgccctgtttgattacagaaaaggttctgaagtcatacaaaaggaaaactcctttgtttattagtatagctgtatgaagggtttatattgccgggctgggccacagctgccatagccatttcctaactgttctatttaaaataatatgtcagagaaccagaaatctatggggccttttgtagtagatcagtacttatccctaaaataggaatagactttggaagcccgttccacatagagggatactccctgggcctagaccctgtcgcaaaggatatgatagactctaaagacccccaatagaaggcctcaccctccctggggagcagaaagggtatggggtaggtagggtgttagttggaggggggggcaaaggaggagggtaggcagtgggaactgggattgacatgtaaaataatcttgtttctaatttaaataaaaaatggagagaaaggaaaaaaaagatgtcagagaacaaatagcctgccagtcataaagaccctgttcttgatgaactggaatactggggctagggaggaaagggagtgttaaactcacagatatttaatattagtattaataaaagatgtctgctgagcattaagggccaatgtgttcagcattttcaggtttcacttaattattttattaaagatttgtttgttttatgtgtgcatgtgaaggcctgcatgtaagtatgtgcaccccttatgtgcctggtacactcagaggccagaaaagaacatgggatctcctggaactagagttacaggatggaagcagtcatgtgggtgctgggaatgaaacacaggtcttctactatagagcacatgtgttctttttttttttttttaattgttgacctattcagaaaacttgtatttttgaccaattctcattcagttacatgattccaggagtgtatatggccaagatccacaccttaagaagccatgaacaaagaagtccccagtgataagatttctcacaaaaccctctgagagagtctacacctattgaaaagtcacatttcatcttagtaaaaaggacacaaaaacaaaaacaaagccacctatcccatcctccaaggatgtgcagagcacatgtgttcttaactggtgaaattttgtaatttgttcataataatatccctcatccaggtgattaatattgaccacaaaggtacacactgcccattctcccactgccttttttctatctcctctctctgcctccccctccctctctgtctctgtctctctctccctctgacacacacacacacacacacacacacacacacacacacaccgagagagagagagagagagagagagagagagagagagagagagagagagagagagcaagaatcattcatggtacattaaaatggagcctgaatggccaatgagtctgctaacaacacaatacttgttaatcttctttcatctaagaagcaagaaacaaaggaattccaaagcgtagactatgtgagggaactttttctgactcccaatgaatgtgtcttacagttctcaaaatgcagactaaagtaaacttgggcctttctttattcagaggctttgctgagaagagagttagattttcagtaaagcttttcctaaaacatttggatatactttttgagtccagggatgttggagacagtaggaactttgagtcttgaaaatcggaattttaaacaaaggccagaaagaatagtgtctattttaaaggcctcttgttccttccgtaaccaagcaaatgcaaggtaatcttaattctgcttcttgtaaatacggcttgcttgatctcattttacaactcactagtttgcattttatacttgatttgtgtgatttcctgtgatattaagcagatgaattcccagccctttgaagccagtttccacgtagaatttttttgtgtgtttgagatctatgctgtggcctgcctgaactcatggaaaactggcgatcctggaagggaattgttgtagctaagcttccccaatggcgcttttaaaaaacagcagtggaaaaaataacagggcgttagtcagatgtgacgcttggcagacacttcactcggcctgccagggcatccccagaaattacaaaccctcaaaggtgttcagggcacagtaaatgaaacacgccacagtttctttatgcccaccccattgattggatcctcccccctgcaagttcttagcaacatggattttgatctgagtgaaaggtcagctttgaagtaagtgtaaagttatttacaggaaatgaagcagaaagtgggctctcatgcatttttaaatgtccccattatcaggagaaaatgaactgtgtcatcggtcagaggaaaaccaaatccctacgttttcttgtgtgaaagttaaataagtagtccagaagtagcccatcaactctgaaattttaaacttcaccagggtctgttttcacccagctttggatgtaaaagctgggaacagcactgtgaactaaatctcttcagtaaacaggcaggagtgcagtgggtgttgggaggaacacaggagggttccttccaggcagagatgctaactagaccttactgataacaacagcaccagcaacatctttagatatttaatttctagtcacttgctagctgacctgtgttggtgtatgcattgcacatacacatgtaactgtatctgtcagagggatgtggtgaattagggcaatcacggggctccttcagcaaggaaaaaggaggagggatctgaaggtgaggaaaagggaaagcatggcttgccttacagattcacacttaggtatggctaggacatctttaaaagatgtgtctgtctgtgagtccttgacttcttcctatgttaggtgagaaaactgactctgagatgagtttagatgccacagatgagtgagttcagtgatgccttggtcccacattggttctcattttataagattagttacaaaaatttagtgcagttgtaattcaaaaatctattaaagctactatgactggactccgcggctgtggttctctttagtgtagccagatagtgtgtggctgttgctggtattgttaaaattgttcccctgttctaagtccaaagaaagaacccatggctaaaggacagcacaaaacctctttagcacacctttaatcccagaattgggtatgggatgtgcagaagcgggtgggtctctgtgagtttgaggccagcctggtctacatggtgagttcagctagagcttcatggtgagaccctgtcttgaaaaaaacaaaaaacaaaacaacaacaacaacaaaacacctcttaatcattgcattgccttaactccactggggccgtttgcttccaggaggatctaagaagatagatatgtttgtggccaaaaggccttgtatgcatgaagacctggatttgatctccagcatcctgtagcttgggcatggtaacactgtaatgctgtagtgggaggcagaagcaagaggataagaggttaaaggtcattctctgctgtgtacagccgagggcatatgcagtctcagatacatgaaagtctacaaacaaatggctcagacatcacaggcaggtgattccccaggacactgtggcagacaaggccagggaaatgccatttccattcaagcactggggtcagaaagccctgaatcacagtcatagaccacacctctcacttgctccccctcagtcctgggtatgaaacttagaaacccatgttgccaaaagcatgacttctctgattcagggcaggttcgggactgaagaactcagcagagagtgcctcctccagggttaggaaaagagcaaggcaatttataagggggggggggaagccacagggattatgaacagagcttccctttaattaagcacactttgttatctcctgcttttcagctatatttctgttcttagcatgaaaacatagtaaaatcttgatcacagtttttaaaagctaaaaaataaaacaagtagaaaaagagctcacccagtaactaagaaaacaaacatcactaagtctctatcccctcctctcaaagtgtggtgataactcataggcatagatgtaaggataagatcaaataaagtgtataattttcagtgtatatttgccattgtataagtgcccaccactaattaactagatagcctagtgacctccaaagctaatggctgcagaagtctaaaactcaactaaaaagaatgcttgctgttgattcttctaatacctgagtggcagaggaggaaatagcagtcagtggtatttatgactttccatagtaaccatttctatttaccccgcctcatgagaggaaatatagacaatcctggctgggttagtagcacctgccattcacaagaacataggactaaaatgtatatgctataaagtaattaaacatgtcaaatataatttgaggggactaagtatagattaatttacacatagtaaattggggggtcataatatttgcacaagagtttggctgatttcaatatatagtaagcatgatttttcaaagcaatttaatacttctagaatcaggcttgagagatggctcagccattaaaggctaggcccacaaccaaaaataaatatttctagaatcttaaagtattcattgatattctatcaggagaactttcgaagtgagacatgggctgcattgccttaattcaattcattcaacgaagatgtgtacagcatttttttatgggccaaagatcaatgttatttttccatgggatgaaacatttcacttactccaaatgtcacttaggcacttgtttgctaatctattgtttagtgtgatcattgtaaagtgaatgtatgggtcttcaaaagatgttgagttaatgaataaaaaagaaataaaaaaggaaaggacatgactgcccctaggtatggtggaggagaaggtttagtgtagatgtgtgggagagcatagccagaggcaggaatggacgagagaatccacggtgggcaccctgagccatgtgaggagaagtgggagaggaagggaggggaaccaggtgcagctggaggcccaaaaaagagcgggcaaccaaaatatctgaattctataaggaagggcagttgggggaagggcagcccagcgcctgggctggagaagagggtaagggtatggtgtgctgcatccataccctgcagcaggtagagactggggaatgctgggagatcctgggggccaggtctgctctgacatgttaaatactcacttcatcactttgtccagggtctgaaacctaacactgaggaagccccaatgctacaagctggtgggcctgagagtggaagccatgtctttcagtctctaacccatgtgtgaacaaggaaggtcaaatgtgctccaatcatgagaagagtggtgtgagtgggggttccaacagacaaataaggagataaactgggacctggttgctcaaggcatgatctgtgggccagcagtttggaagctctctgagtgctttagaaacagactagctagctccccccacacctgctgaaggaggcctctggtcaagcagccctccaggtggcctgcataatgactctgtaagctctgagctacagctgatgtcatgggatggtgtctgttgtcttcctcttcttggcctcctctaatgcaaatggctggcactgctctcagggtggatgctgccagtggaaacacggggcccctaagatgggaagtcagcaagaacagccgaccgaaaaaggaagtttatattgaggaaggtttggtctgcttttatagcccctggaggaggaatagcactccacagaagctgttaatgatgggctggatttgaaggcagtggtcggtgccaagctccaaatgtgttgttactctaaaccttccctccagacgccttgttacacttcggagttttcaacgggtaagatccacttgcaaatggctggttacataaatatagtcaaagtgcatccacattaaccttattttcaacttcttttagtaatttcattaactttcactgggcagcaaattgtttggcagtgattggaaatgtctagttgaccttgatagagagattttagcagtgattgctctgtttaacagttcgcacaggtaactatggcaactctccatctcagctaggaacattccatgcaaaccccacatgacaacaatgccagcctatcaggcccctttagtaagtaacccaacaatagtggacgattcaacctacagaaaagactttctgttcacagggaagtcaccaaaatggcacttcacagggagatctatggccttaacatacaggctggcctgttagcataatttctgtgtactgttgaaaaaccctcacctttccactttgaacagacaaagagaaaccaagtgccaccatttagacagttttgcctagcagcacgttttacctgccagggctagctgcataaaagtgtaaataaatggtggttatagtccccactttgcagacaggcacactgaatcagcaagactaggacacagcactgtgcgagtggccacagttatcaagtctgccatgactagcttgctatactgctccagccttttttcttcgattcaccttctgctaacatgggaaacctttgtcctcacatactgtgccaagctcagctgcttctcagcaacttctcagcctccacaaaaggttcacatggtgattaggtctggtcatctctctaccaatctcatcctatggtataaaaacctgacacctgtaaccccatctcattgatgctcacagggcccagtgcctgcactcctttgtgagtttgctggtgtccaaccttgactctgatctactcttcatctcatctctcgtattggaatctctcaggctctcctggaatggcatcctttccatggaggttcttccaaatgcacagactcagttgcttcctcaaacactggcggttacgacttgactgcaatgctggttatactctgaattgcatcatcgtgagaccccagctcttaggggaggaaccatgtctgtgctgcactcttccactgcatccagggtgcctgcccacaagacgtgctccatagtatttagtgagaattccattttcagcacccacactgggtttatacccatcggtgactccagctctaggagaccaggcaccccctccagcccccacaggccactgaacttacatgcaaacccacagagacacacatatatgcagaattttaaaatcttttaaatgttcttgtcatctgacccctgacagagtgtagtccctttccttagcaaacaagaggcattggttccttccctcccaagacagaggtaccagactccacagaagcccaagtccctcagacaaaatgggcatggcatttgcatgtcacttgtgcataacctctgtgcaacctcctgtacattttgtcatccctagattgcttatgtgtaccacagtgacaatgctatgtaaaccatactatgctgatgtgggtttgggtttctattgctgggaagagacaccatggccacagcaactcttataaagaaaacatttaattgaggggcctcactaacagcttcagaggttcagtccattatcatcatgacaggagcataatgtcatgcaggaagacatgatactggagctgagagtgctatatcttgcaggcaaaaggaagtcaactgactgtcacactgagggaagcttgagcaaaagagacctcaaagcctgtccgacaatgacacacttccttcaacaaggtcacacctcctaatagtgccactctctttgggggccattttctttcaaaccacaacagctgattaggaaataagcacactaaaagtctgggcatgttcaatacagatggtaaagtttttcaagtattttcttttctttcttgtttttatgatttttttttttgagacagggtttttctgtgtagtcctggctgtcctggatctagctctatagaccaggagggcctcagacttagagatctgcctgcctctgtctcccaaattctggaattaaagtcctgctccaccacacctggctctcaagtattttcagttaaagattggttgcatcagcagagttagaaccctcccagttggaaaagcaaactgcttatttgctgttgtccctttagctgctgtgatttttatattgcaaatatcatactttcaactttttattccttgttttgtttgtctgttttttgagatagggtttaatctgtattgtttgggggtctgtcctggaactttctctgtagaccaggctggccttgaactcacagaggtctatctgcctctgcctcaagtgctgggattaaaggtatgagccaccagtgcctggcaactttttcactctgagacagagcctcaatatgtagcccaggctggtttggtattgaatcaccaaatactgcagctggcattaaatttacagtaatcctcctgtctcagcctcccaacagctgggatcactgtcatgaaccatgaggcctgggttagtttatctttgcaactggaccctacaacctaggagcacagattcagtgctttaggcattcccagaaggaaccccgaacaccacagacctcaggagtcagcatgccaacagagggatggctccttcagctgtccggtgggaactttggaatctacattcacactgtgatatgaattggaagtccctataggctaggagccaccaggcatttggccttactctaagtctgtcttcagggaagttacaactaggacctaagtcctttgattctcagaaagtgggtatcccttaaaatgtcctttgacaagttttcttcttcagtctcaaggctagactcatgttcttggtgggtctaatgtggtacaagaagccattttgggctatgtataggtaagggaagaagagactgttaaggtcctcattatatacctctctctctctctctctctctctctctctctctctctctctctctctgtaggacctttacacgatgcctcaagtttcagcattagtaacttgcagacagctgctggaggtcataaatatcacaaactattcctgatgcacagagcaggctaagagcctccgtgcactttagcttttttaatgtgtgtgacagcacagcacaggttcgatagacctccctcaaacttgcagacatgacctggaaagtggatacactggtctaattagggttggagctttccccagtcacagccactcatcatgctagggccctcatcttttgttctgttccttcccttaatgcccagaaggcagatttggaaatggtaagatggcttttacactcactctccatagtaagctgatccttcacttaatggtcaccatatacaaggttgggggctttcacttgaataatcatgtagtctgtctggatctgtccctgctcctctgtttagttgcttccctgactctgtatgaagagtaaacttttagggccatttaatggaaactcattatgcctctttagcaaagctagtgagaccatctcctcctaagtggtagcttaatggcctcaagcattaataaaataaggggatggggctggtgtgaaagtgaatgaaaggtgccagttgatacccacatcacctgttcttccaggaactagagaagggaaagaagcccaagtctgagagtttctgagaaagctgcatctgcaattgacactttagtgacttccaattcatggggagccttgcaaagcatttctggtgcttcatgaccttctacgacctgtggccttccacccctctttgtttatgcttctaccagtgtaagtgcatacatgtatgctcgcactcnnnnnnnnnnttccctttccttctcctccccccccacttcctttttgaatttgtacaagaatggtgatggtaaggagaacggaaatggagtcttgtgtctgggggattttcactcttgaatgttttgtcccaaatcctatctcagtatacatttaaaacaactcaacaatatttgctgagtaaagtaggtattatgagtaacatttacagatgaacaacctggggctgattccctaagagataatgacaaagccaagatgggactttccttccactcttgtgaggcaagtcttctatgtggagtccattatggcataattactccttcgaaccctcctccttcaaaccaaggacagagatgggcctgtctccccatcctagctcagtgtccaacacaggaatattgggactggaagatgggaaggtgcatacttgaagcttggatagggaagaaatcagtggcctgcagaatcatagcagtcacatctgaattgtgacacttgatgaggttactcctaacctgtgtctgcctgtgaggcttgtgatagtccccacctcttctccagctctgcacactgttcctcaacccagataagtctcttgttcaaaaatgtcccaatgacacttccttacttgccctttaccacctagtggttccagagagaatcctgagtcatgctttcaagccttattatggaccaagctctagaaatgacatgatatcagaattcagtcttccctctgcaggatagaagtcacgagcacatatgagatacttcatttggtcacaagactgtgaaggtagaatatttaaaatgtcccagccaagtgttaattctactccttgttcacagagcatgctaaactcttactagatagcaggaagtgtgtgaggtattgagggcaccaggagcatgcagaccaggaggacctcagtccagtgcagagactggaaggcacatggtcaccaggaaaagactttcagtttcttccgagcacagtatcattcaggtaaactctcttggtgcctttgagagatgcagctgtccctgcctcatggggagtctgggaagctgaggataactactgtgactgacatggagagagagaatgcagggagggtttacttccagccatgaggtcagtcagaaagcatgagagtcagaaatgggcatctcaccatcttggacatcaaaatcttccttgattgtccttgtgcacaagtgtgtccaggaatagaaggcaagctccttagcagtgagtgattttgaaaggatgaattcagctagcatgtgggtcagctcaggtctctgagtgacctcattcagaaattctctctcatcactccagtcaggcaagtgagtagccataggacctgctgtgccagctgtggtgccatggtgggtctcagtatgcataatgcaggtctgaagctctggtttcctgccctggctgaggtggctcacatttcactgatgcgggctttctgagtgtgacgctgagtgtacaaagaacagaatacctgaccgtgctcctcctagctggaacctgtgtgctttgccttggttctgtgcagaatcccaatttgctgtcttggatttcacagagtccttgtgagaaatcaagcctacagaagtggtggtttactgcagtctgggggatagggttcttaggactgaatgcttctattttctttgcaaaaaagcccaaactcacacctatcaatccacaagggcctgcgtttgcctacactttttctcatgcaactctcttctgtgtcttgtttgcgtctctcccttctcaagctgcttccagaaactgaggatgctcaggtagagttaagcattgcctgcagagccacagagatctggagaggaagagtagaaactcgtgggttttcttcctctttagtagagtgacgtcttagaatgcagggagatgtggaagtcagagggcaaagcaaggctgtgcttcatgtctgtagaaatgctgtgctggctcaggtgacccccagggcagtagtttctgcacatggaccactttcaagtcagttaaatgctttgcagatgtgaatataaactgagcacaaagtgaagggtgcctcagtttcctttctttcttctgcagtcttttctgaagaatacctcagtgtgtgaagtagaggcctccatcataattacatcctggatgagcacattatgattaacaagacagtacgtacagaagctgacaattagacttgaaataagacaaaagataagtcagtgcttctttggaacatttccacaggaattttcatacaacaacatacctacatgtgtgtctgctagatacttttaccacccagctagcattataccaagactttccttcccattaataaaagaatcctgttcatggcctgccttatagcagagagaacaatttcaaattgacagagtattgaacattccctatgtatcatcagaaatatactgcaagcattctggtgtccctagaagtctgctcatttctggtcaaaatctgagaccactgaggttccttccatgcttgagggatatgaccctctcattgtctgggagcaatttgggaaggcaggctctcccaggacaccaaagaggatttgggatctccactaagctagtggagagggagctgcgctctgggtccagtgtgacacagagatgctggaacctttcttgtacttgctccttacagaaactggtctgaggtccaggttggcatccatactctccttccttctcagatcaccttcaaatgactcctgccacctcccagggaacatcctttcccatcttctcccagatcatgggttctaaaccacagcatcagtgctagagcagatgaggagagggaaagcccctggagcaattcagagacaagaaggaaggtagtgtgaacgctttgtagttagttttcaccagcccttccatttctctgttggtctctgaggatcctgatcctctaggtcagtgatttccaaacctcactgatcactgtcacccagggacactttaaatatccgtgttctgtgtccccacttggcgggcattctaattctgagggctacaaaaaggcaggagtggagacaaagaaaggaagggaaaggagctgaaaattgctcacttgggcatcttgcttcacagccttccacaaatgtgatttattttttattattcattacaaagagttaatgatataattatccaaaagcaattagatgcaggatgaaaacaaagtgcttaaggggccttgaggcaggcttgttgaaactgagactggaggagtcagatatctccgtggtggactctgcagggacctgagcttccggcttcacaccaaaacaggggagaaggaagtctgtgtcagggactggtgcaggtcctttcttctccatcttccatctggtctttaaggtctacacagacaccaccatctccatctctggttccactgggctgcagtgtcctcagagcaaatgtgtcagtctttttggaaaatggggacagtttatgtttgctaggcagtgttctacgcagcagagactccatggtgagtgcattcaggagttctgtgtgttctgaaggaacttgtgttcttggcgggaactaatagataactaatagataagtaacgctgttacaggttataatggactcgaaggaacacacaaggtcctggaacagagacgagagtgtgttggaatacacgagtaattttcagcaaagggggtccacttagagaacgaaccaactggactaggcatgctggtagttacctgtaatcccagcactgtgggggtcctgaggcaggtggttgtgagttcaaggcaagctcggtggagctcagtcaaaacaaatcaagtaaacaacaaaatcaagaaagagccctctgtcctctagtacctgacttgctttgactctgagtctagcttatataactggttggtctgagaatttagcaagtgactgactcaaaactgtgcaactgagctaccagcagtatgttggcagactgcgttctttctggtggatttgggagggcatctgtccctgggtctcttcctgctctcccaggctgctgccattcttggcttctatccctgcttatcttttcaaatcagcacaactcactctgtctctcctgcatcccatctaaggacttttggattatattagttccacccagataaaccgggacagccacctcctttggagagcctaccccagccacacctgcagttccttctgctggttaagacatcatcttcacacagccaaggatttaggcagggatcattatgatgggagcatttctgtcttttacttttattttttactttttttatcttttaagactggattccctaaggcccagactcaagatctctctgcttcagccctcaagtgcccatcatacctagcctagaaaatactatttcctcctgactcacacagcagaacagttgtgagtcagtgtggtaacaggaatgaaagtagtttgttaaggtagaaaagaaggacaggagggacaacttagcagtaaagagcacattctgctcttgcagaaaacccaagttcagtctccagcacccatatcagacagctcacacttcctgtgcctccacctccatgggatttgaggtcttcttctggtctcctctagcacctgcatgcatgtccacatgctgccacagagacaagcacaactgcacacaattaaaagttaatctttttaaagttactagagtgataatgagttctgtaattctttaagtgtggagaaactattagagatgaaaggcaaaactaatggaggtaatgtttcacctggaggaggaaaatcagaaaatcaattcttttgctctgcttgaccatacagaaatatggggaaaaaaacacacacacatcacacatacttatctccagacaggaacatgtgagaagaagggcatttgactgcacctccccttgacctcatcatttcaagcccacatcaggactcaaacactgtctctacgagttgtgtgttaattgtaagcacaccccctgcaccattttcttttcaggcttcacatgtcttcctcaggaccgcaagccttccttccttctttccttccttccttcctccctccctccctcccttcctccatccctccttttcttccttccttctttccttcctttctctctctctttttcttgttttattttttttccagacagggtttctccatgtagcattggccatcctggaactctctctgtacactgtacaccaggctggtcttgaacccagagatctgcctgtgtctgctcccaagtgctgggattaaaggcatgggccacaatgcctggttaacaactttttcttaaggaattatttcatattctaagttcggagcttaaagctggagaagtcagcctttgctctcctgaagcatgtggtctagcgtgctctccttagagccttgattgttcgcagccttttcaatcacactgggtcaccttctcctgaattcaaggatcctatataactcaagtctacatctgttatgacacagagtctaacaattctaggtttcacagatgttggttggattaagcagagtggcagttcttagccattaaagttatttcttggcataatgagggtagcatagaagcctttcatctgtaggaatttcagaagacagtgggagtctgtctgggatggatggagttacctggcaaaaggtggcagacatcctaggctaaactactccttaggtcttgtccagactccttattataactacagttgctccttgatcacagagtttattcgtttttggttaaagataatcctgggcagtggggtgtggtaggactctggaagatttcagagcatttttattctaaggctctcagtttctggtaagtgaagggtgatgccttgtcgaggaatgatgagacagacatgaccgctgcttctttacatgtgttagtttcagtgcacacctgcactctccttcctcagctgagacacttgctgaagatgtttcagcagtataacacactctggggcatcactaagtccatggccaggccatgaaaactgcccaatcaaggaacttgcaatgctagccttgaatgcattcctcaccaatgctccttttctcctcattttctctgaactctcttccctttggaatgtcctactctcacatcttgttgtacttaaagcttatcctaaattgttcagatgtgatctcatccataaaggttaggccttaccctttgggtccaatccagctcattcagatacctcaatgaacggtcatcagttcaatccatctctaactattattctcattaacagcttgctgacatatttgttcttgcctgcttgttgttttaatgtgttttcttttattcctctgtttctcctagggacaccacagtactttacacttagtaggcaccccatatacccttgttgagcagctccattgattacctgaaatctgaaacctctttctctttgccatacatagggaccagtaccacaccccactgagcagaatgcagtcaaactagaggagccagtcacttggtaaagctatttggaaacctgttgtatttttccaccttcccccctcccaatcctacagattctgagggttcagtgccatatgtccccatggctgaacaccagaaagcttaacagttgagcacaaaacctgtctccaaatcacacacaagccaagacctcctacttgccatgttgatagggcagtagggaacacagaaaaggtacactgtgctatgggctggctggcagggtcctgctccagttcaggggaggctgaatcaatcagaattgtgttttggcaatatggttcttnnnnnnnnnncctgccatctctgacttttcatcccaggagggtggcatatgcagcatcttgagtgcctacaggaacctacccagtcagaagaggtacgctcatatagtgagagtctgaccaggaataaaaagcgtgtgaatacaggcagatgtccttgctcactcttatagcagcacaaagagaggcagaaagcactgtcagcctccagtgagaaaaagcaagtgctgtttctagctgctgatgccactcggctgcctagaaacaacattggaagccataaggaaccttagtgtctaattctggcttgttggggtggggagagaatgagccaccaacctttgcgagaatgagcatcgctgcccagggtctaagcattatggtttcctgatgctgcccatcgggtttgtcagtttcttcacagtcctctacaaatgctgtgccagtagacactggaactctgggttggaagcctgatccattccatctctccaggccctcagcttttgcaacctgaaaggcttgtagccaccctctttgcaggctggtatcagcttccatatcccagcttcagagaaggctttcctgaacataccactaaacttagcaacctcgtctgtgtacatctccaagaattgatcacttgtaggaatttttgtattcatccatgtcctatccaactagatggcaataactcatcagatgccacaactctgtcttgtttatgagaacaaaaatctcttctccatagggtagaccctaatacatagatactctgtgtctgtaggaggcttgtgatggccacatttcacggaggtagcatggccatctagttagagtgtttcaagaatgcatgtagcctctctgagtataatgcctgctgtgacctacagcccaggggccccctcctgcctctccatccccagtcagaacttcaccagaggccttgagttttgcataatgctgtgtgcttctgcctttcttacacttggatctcacctctcctgcctgccccacccccactcccatttacttctctgttgttcaagatcacagtcactggctccgtattgttctagtgtgcttatgccttgtcaagtcagctgagagatgggacctgaccccttgtcttctgataaggacactgaatgagacacttatacctgccatttagctggcccccaggagaatctagtacagacaagaacaaacatggtcaaaactccagtattcttaacccccttccgttgcaggaacctttctatttcggaaactctagatgttgcttctttatctctaggaatatctggggctttcccccctaaggccccctccaccctgaaaagacaggaagctgatgcttgctgcagggcagggggtcatgatcctcagtggcatggccactggtgagatgttcttgtcaagtgaatatgccctctgcccatgttcatgcaggcaaacctgattaaatgtggtgaccatgtaaacaaatggaaaaaggtgcagacccaggaggagttgctgggaagaaaagagggtcccatggtaggggagagaggataacagaacatgatcaaagtacattatatgtgtgagtataaatagaccttttccatcaactcaggcaacaagagaagtcatgaggtgttgtgagggtgtgaagtgataagtggagagagcactgagaggcagactcactgagaggcagactcacgagagcggaagtgtcttgttgatgtgagtggatcaccttgaaacaggttctgggtagggagagaaggggaatgaggcaaagatgaaggtggacgaggactccagatgacaagaggttaaaaacatgagtactagccaagactgcaaacagaggtctctgtctgggcaatcattcgccccatggttaattctgaacagtcaaagagtgatctgctatgagtgtgttctctttatttcatttattttttcaaacattacaactctggagatgttctgttaatttcctagatcaggatttcatcaatttttttggtttttaagatttgtcagtatatccgaggccagactggtcttcacagtgagttctaagacagccaggactacatagagaaacactgttttaaaaaaataaacaaaaacaaagccaaaaaaccttatcaatagtttgtgagtgtttgcctgcatgtatgtgcaccatgtgtttgcctgggcctgtgaaggccagaaaagtgtatcagatccccagaaaatggagttacagatagtcttgagccaccatgtgagtgctgaaaaccaaacccaggtcctctgcaaaagaagccagaacccttaggcactgaaccaactcttcagccccagccaattcttttttatttttacttcttccaggaggtgttcccaaccacaccacggaatgaatggagagttgtgttcacttgcacaggtgctctcattggcttccagtgggtttaagtcctcctacaatttataaatgtctaataccacagcaccattggagagccatcttgatgcagaggacctttcactccccagaaaccagacactctgaatttaatcctgctggttttcatcttctcctaactatttcaaatgcaaacttcccgacaaacacattctttaattcaggcaacagggatggttggggtggggtaggaggtggggtgggacacattaggaactcatcctagatgccccctgcacctgaatgactcagtctaaaatggtattagagctttgcagcaaacccacttcaggaaagctggagggagattaaacaaaagttaagctgaaggggaaataattttatcagaattagggtttttacatgatatagtgaaagtctcatagtaaataagctgtcttcttatgggcttaggtgcgcaaggaataattttaaaaaacagattcaaagtaactagtacccaaaaatccagcaatgtaggtggcagaactcttgttgtgtaaggttttgcttggaacagcacaattaaacatgagcacctcttgcttgtcatgaagaggtgaggaagcacatgtctttttctttttcctttaaggaactttccactgtgctccagttctttttctttttctttttttccctccttgttcatcttcccagaaaccccatgcttcattttgcactgcaaaaaggcaagcaagattcagactgttcataacagagcacaaacacagttctgcgtttttatgtgttgctgtctgattttccatgacacagaatggggccacagtgactagcatagcgcttgctttccctcagctgacaaacccgcagaggactgtgacagcatcttcctcagcagctgaccccactggctctgacacttttgctcttggctcttcttttcttttcgttctaagaacactttccattagacccaggatgcgccttctgttaccaaaaacgatgagtcagaccaacgttgggatctatagctggctgttctctcagtctgctaagattacagaaggaagggctgacgagtgctcagacacgtgacaaagggggtgaggcagcaacctgaaggtcagagctccctgatgcctgggaagtaggatcaggccagggacagatgtttcagctgcttccctcaggttctggggtccctcacccactccccccatcatactctctacccctgagagtgttaattgtcaagtctacatgtgcctcggagcatgcttacagggggattatcttatgggtgggaacatttccagagcagggaatcatgggctgaataaagcagaagtaaacacgaatgcatctgtctctctctgcttcatgattgcagatgcaatgttaacagcggcttgaagtcctgctgcccctacacgtccctcccacccccgtcatgacgtactgtaccttctggttgctttttgaaagtgtattttaacacacagcagaaggagtgaaaaagctaagacatggtctttatccagtaggctgtgatggtctcgatacaatactctgttgagattagagggaaaatgatatttgagggaaaacaagagcacacctgacaaactcaactctttggtccagctggaaagcaaagggggggggggtgaaggcagactacagtgccaaagactagagggttcaaggacactttctgaagaaggctgattcaggtccccacagcgccccatcccacgtgctgagttctaagtagaagccaggtcttcatgcccacatctggaaatgcctgagctctgtttccctttttttgttccctttaggcaaggttaagtcccagttcgggttacctacatggcttctgtgcggctagttttaaatgtcaatttgctatacactagaatcttctgagaggaaaaccttgattaagaacttgcctaaatcagattgcctgtggccatatctgtgggtaactgtcttggccacctgccgacgggtagtcctgaactataagaaagctgagtataagccagttagcaggcaggatccttcatggttcttgtccctctctaactgtgagctgaattctttcattgaaggtaatgctgtgtagaataacaagcaggcttgtcttcaaatccctgtcttgactttcctcaggagtgaactgtcacctggaattaggaattgactgaacccttctgtaccctaagttgttttgggatctccacagcagaaatgtaaggacaggtcattgttaggaataaagcttaatgggctgggggcgtttgtggcaggaccaaggtcagttgtgcagcagtggtcctgcagcatgtctacaggcagatgggaagactcctatcgaaactttattgagggggaagtaagaaaataagggaaggaaagacaagagaggtaaagagacacagagacagagagaggacagaagagaagagggagacaggaaaagtcctgtctgcccttcaggggaacacagagagaagagaagtgggtggggttttcttacaaagggtttttgcccctccatgcagactactagccatgggacactgggctgaccagggtactgcctgagtgcattctgccagctatcaggggaaggccagcataatgcctgaatccttacagtcatagcacagaagtttctgtaatatgtaaagagtaccccagccaatagaagcatccatgaatacctttccataaaaaaaaaaaccttactgacataatttcattaatcttttccaacaaactgatgcttctcttttaccttccacatagagatgtttgtctcacaaacagcattcgtaagtactccagtcacagaaccctgtgataggccactgttgatagaggaactttaaggaacaaaagaaagaaaacctaaccttgtgatggacatatcagaaaaacagcgtaagaaattagctttttctccccaacagaagagtgtggctagaaagctaagatctcccctcagcctcctgaaagattttgtgtgagcagttcctacgctaaagctagtgggcctagagagctgtgggctctgaattcagagaataatgttttcctgtgaaaatcaaacacatctattctctttcaaagctgtttctttaattatggaggagatggccagcacacgaggcagtgtcattctcaagtacctagaggtgacacgcatgcagcatcgtgcttaaaggatcctcacattcaacatcttttcatgtgcccaccaatgaagatgcaccatttccttttcagcgttcggtctcggtgactcggtggcagctttttcagctgccacagctggaaaactctagtgaattccaaaccgtgattagagaaatcagagcagagttaaaagaagtcaaacaatgggagggagggagggagtaagggagagagggaggaatgcactgtgtgcacacagacaagtcacatacaaagataaatcgcgtctgcccgtgaccatattggcacctgtcataaagctatgaatttgctaggaatgggtaaaggtcatatggagaaaaaaattctctttctattaccaaaggcagtgaagaaaaaggcacctgtggcactcgctcttgggggtggggggaataatgttactaaatgatattggaagcttaaaaatatgaaaagcaagaactgaaatgatatgtaatatctaggtgagctcagataatggagagtggtctgaattgaggcagagatggatcaaggattgtcaaattgttccctccctctggctgtatatctttttgagttcagactatgttttctttgatggagaaaatgataggtttgaaaatacacgttgataggcatccacagatcaagcccccctagtctttctgattcaggggcataaaactgtcaggtcaaaagcaattcccatatgcgaccttaatttaacaaatgattagacccaatcctggtgctttgaagtgtctttggttgtcatgatccaagcatgatattattttaaacaggtttttctcatccctaggtttctgaaagggtatatgctgcaggaatttttcactcaagtcacccataatatctatctctttttaatgttcccctggggtggatttttgttctctaaacagtattttcccatatgcttttactcatttaggaataaagcctgaccaaaaacaatgcctgagcttaggacccatctctctgggtgcctgtgtctcacagtttggcttcttacacatctcttctgcgtggaatgggtgttcaaatccttgttgctaatgctgacacacttttcctcaccccagagccaggcaaactccttgccttccacttagaatctgaaggagggattgcagcctctattgtccttattgtgctagaaagaggtaaggctggggccagggggagaaggagagtgagatcaagggagaggattaagcagggtgatagcatccgtgattcaaacattttaactgtttatctccaaaatgccaagtcgtgtgctttaaaaaagaatggccaggcagcatcctccctgttgtgctctctgctgtaaagcttttagggaggagctgcggcctccagttctctctttaacatgtgaccatttggcttaagcccccaaccactgtcaaatgtgcacacattacacaggagttggccttgccacagatgacccagcaccattggaggagagtgctcacatcttccttgacattttctgttgctcatctcctccacctatccctgccctcctcactcattaagtcttcatgcccctggggttcagctccattcctttctcttctgtttgtcatctgctagcagtcaaaccttcactgagcacataggagtctttctactcgatttatcaagaacccaaggctctctcctaattacccatcctgaatatttagccagcaaagggatatagccacttccacaccctacaaacctctcatattccacatgtccgaacttgaacccatcatttgcctggctgccacccactgtagtcatgaaacacaatcctctcctgcattccttttctcagtgaatgagtccaatttctatctgggcactaatcctctctctcttctctccttctttccctgcttctcttcccttttccaacacacacacacacacacacacacacacacacacacacacacttctgacatgtaattaaccatacatttcattaggttcctagttgctatgtttgtccccatgggtggtggcatgtccactcatagtaatttagctcaaagctcattcttactatcttatggagcactgagatttcactggccttggggcttaagatatcccatctctggcacgcacagagagaatctgtccatgagaggcgctgtctaaaatatacagcaaaccatgtcactgccctgctgaaaacctctggtcatgcttcttcacatggtctctaagccaataagatctcccctgactcttcctgagctcactcctcacactgtcttgctggcctgccctgttcacagctttgttggtgttgtacaatccctgaaggccttgtgtttcccaggaaataactcccttgaagaaagcagaagttttccccagtgaatatatctggtaaaaagcatgggctttcaaagaattgaggtcagaatctcattctctctctctctctctctctctctctctctctctctctctctctctctctctctctctctttttttttttttttatgcttcannnnnnnnnntgtgtgtgtgtgtgtgtgtgtgtgtgtgtgtgtgtgtgtgtgtgcatgtgcctgcaccctcatgcaggtcacacactgtggggtagtggtacatatgcatatgagtgcctgtgcatgtggaggacaaggaaaccctctgtgtaattcctcaggtgctgaccactttgtttcctgaggcagagtctcactgatccagaccttttagttaaacagggctgtttccctttctgtagtgctggagttagtagcttgtattcccacaccccactttttcacataggtgctgaaaattgaactcagtcctcatgctcacagagtgaggactttgcttaccgaaacaccttcccaacccctgaaaaacttttagtaggatcatacattttcatcaataaaatgtatagatttctcaaggttgtcataatgaacttatagtcacaatagaagttggtgttaccaggagatttctatgtgtcaaagggtatttatggactttatacatatttatttaattctgcattaattttgtgataaatatgttatttttgtccctttttggagagagtaggatttaacctaggacatcaggcatgctggtcaaactttctcatggatctgtatgtgccagcctttgaattttaaagatgagaaaaatcaatgtacaaaagtatgagcccttgccttaggttgtgctattgataagggagccaggcttctgtgaaacatctagaaagtgccttctgttgactgtcattctactaataacactatatgctcctcatcttttcctctgcccactcaacactcgctcatccaaaccctgatggacacccaaaaggctaaatacagataatagctgaatggcaacgttaggaaaaaccaaagtgtttcccccagtctcgtcacaaaattctttggacaccagatgtgtggggtttttccacacacaccaactgtgttagtctctttttcattacagtaataaaacactcaaggctgggtaatgtagaaagaaaagaagctcattcaactcacttttggaggctgaaagtccaaggtcaagtggccccattctttggcttcccaagagggactcatgactagggccccacgtgagagtgtgcgcagagctgatcacatggaactcagcaagcaggaaaggtccagctttctctttctatcacaaccctcccccaggattacccaggagaactacattcatctcctccgaaggcagaagcccattgacctaattattataggtcaagccccacctgttaagtgtatagtgttccattacctcttaacactacagcttaggtaccaaacttccaacccatgaatccttagggcataaccatgggaacatccaaatctcctcttggagacaataccagacaccacaggataagggctcatacccacagactatctctaacctcagatgccagtcacaaggctgaagccatgtcctaggtttggaggtaaccaatgcattatagaggcagttaccaggggtgctgatacacaagctggaggggagttctcaggaagagggaaggaaaagaccctggccttcattggacatgccaacctgtaggggtccccatcagctgcttgaatgctctccaaaccctggctgtccaggtcttatgaacacgtcattatgaacatggaatttagtaaataattatccatttgtgctcaaacaagcaggcagcccctcccctcttcatggaggtttggcagggatcagctagctgtgtcttatcatattacagtatcacatttacatctattaatattttattatttgccacaatctgaattttaaattttatagacattttcacatttgagtgtcagtacatttactgagttgaaaattttatctccttataaagagggggaactgaggcagagaaggaataattatagtacatggtgttgcctatcttgtaaacaaagccttgagtcccttagcttgtgctctgaattgctataataaattgcctccgaaggcattactaggcacaaaatgatacttttaatctttactggaatacttaaaaaggcattatagcaagcataactacaagatcattaaggaaagccaaacattgatagagtggctgaaaaaacggaaccatgaccatatgtatgctctgggagggagagggttttatttgcaatcttgtggtaggacattgtctgagtgtcaccatgtgcaggcccagataccctgctctgacactctccacctcattctcttgagacttgagacacggtctgtctctgatcctggagttcatgatgttttcgctcctctggcagtcaacaaatccagcactcgtcctgtctctgccctttatagcactatgttcacagacgtgcacagatatgcacagacacacctggccttttaatgtgtgttggggatttaacctcagatcttccttcatgcttgtgcaagctcccttccccatgggcatctcctcagcccaggagacgtgtattacactagggtcagatgacagcaaaccaaacacaccagtcaaaggacgctctgttctgatgaagggaacagacatagcagagatctagacagggctgggggcaatgagacattttatcctccaaaaatgtagccagtggatataatgttaattgaaaagtaggaaaatggaaaaatgtgtgttcttggtgtgggagcccatgtcccagtgacctctgtccttagttcacaaggtggcagatgctgtgcgtttatgtgttgggagtgtctcagtcctgcatagtgtctaaaggttaaatacaattaacagctaggggacttttaaggatcttaagattcctgagttgaagctgtccccctgatattaggcagcccaggcaacagtcaagagttttactttaagaaatggtgcagaatgaaggccaagggaatagcaagtgcatcctcatagcatgttcatcctcagaaaacacgagaaagtgctgtgccatactcttgtgtagagacagggttcgagaacacaagtgtgctctggggaacttcattcacccttacactcccagtttgctgctttcatggagaattggttccatgtttgcttgttaaaaagatttattttccaatataggtggtttttaaattgttttctttccccttcaaagctggcaacacatgaaaaactagaatcttccaggtagagaaatcacttccaccctgtccttaccagactgagcaggttcataatactgcaagccagtgttttaaagaatacttctactgaagtcagtgtctggccttcattgtctctctcccagggtcatttaaataaccaagaaacagttcccataaatgcatgacaaatattggagttttagtggaaaaagttttcatttcttagaaagctagggggcttttctatctgctcataggtctcattttctggtgtaggaggccttaatagcctgaagcacagattcggaatctttagtttatttgtttgtttcagctatagcagagtatctttgtaaatctcttcatgtttcataaacccaattaggattcccactcagatgtgtctttgatgtgaagatgaacatagactgtagaactgaggctctctgcagagctgctgtctgtgtggaccacacagttcctcacactgacatttagaacagggaaaacacatcaactgtctatactgcacctggatacagttgctagaagaaaaatatttctcccaaagtttcaaaagatgacgacatcaagtgccaagaacatcaaaggcacagtttggtgttcagggattttgccaaactaccctctaaatgctgcttaacattcccaagcgattgagttacagatgagcctgaccctgtagggacccctaaaaagctcttatcctgcctgtgtatctagatgattacacccaaaccagtttgaccattgcagtcctcagttgttcaagcatgatttccgtagaagttgcatttccagattgttcttttgctctgaggggagagtgggtggagatttgacctcaggccctccatggacacccatgtggagacgtggagacaacagaagtcctgttccatctctgctgtggtgcacagctcaaactcttgattaggaacgtccttctttcaaaacatcgtggaaaagtggggataatttggaaaataaaccaaaataaatgtgtgcttagctttttaaatttcatttatgctataaaaattttaatttgaatgtaattgttggcttatttgcatctttgttttagttgggagtagtttgttgcaaacggcaggaaccttttctttttttttctttcttttcttttttttaaagatttatttattgattatgtatatagagttctgcctgtattatgtatgtagtgtatgcctgcatgccaaaagagggcaccagatctcattgtagatggttgtaagccaccatgtggttgctgggaattgaactcaggaccttagaaagggcaatcaatgttcttaacctctgagccatttctccagcctgagcaggagtcttcttaaagtggttctggtgaattaatgataaaaggtgtgtgtgtgtgtgtgtgtgtgtgtgtgtgtgtgtgtgtgtgtgtgtgatcaagtattgaagagtaaatggtagggaacatcactgaagacccctgagcatcagaagctagtattagaacactggaggctctccctattctccctacctcaatctcctctctcctcctgtctctcactctatgtcagttccgttctcctacatcctgcagatgaggcatgctttctctgtctcttcttgtgtgtaactaaaaatgactccaatcaggagaccagctgtctcactcactgttctattgctctgaagagataccatgatcatggcaactcttagaaaggaaagcatttaaccgggctagcttaaagtttcaggggctttgtccattatcatcatggcagggagcatggtgacaggaagtatggtggcagttaggtgtggtgctagaaatcacctaagggctacatcctgatctgtaggcaccggcttcggaaatctcagcgcagtgacatgctttctccaacaaggccgaccctcctaatccacttccttgtggataagcattcaaatagatgagcctttggagacattcttcagaaccaccacagcagccatggttctcatttcaaacactcatgactataggacaggggaatcttgatttcattatccattgctagaagagtagttaaaacattctatttgagcctgcagtacaccttggtcccgtctactggggctggttaaatgaaatggtctaggttagcatgatttactcaggaatgtggggaagtggttcccaagggcatagatacttagagacagaccatgccaatctgttttgtaggtaatatgtgttcaatgcagaaaaattagaaaatactgacatgagcagacaagaaagaaaactccttctaccatcagaatgtccttcagcatctcaaagtttcttagaaacatttgtatttgctctaaacactcttctcactcttggatttttgagccataataaaggtaatatgcagtagtaaaaaagacacccacatcttttaagtcttccatacaaattattttttaatgtggagacaatcttttaaaatggaagttaattaataatgttatttaaaattataagtatttcaaaggaaatagccaagaaatcgtgaacagacaacaagagaagcaatctttagatggactaatcatgagaaagatttctgctccaccctcagaggagatgaaaaaagagctagagctagccatggtgagacagcagagccctgggagtaagtacataccagagggaaggagctatgtacaaagtacatgaaagtgaaatgattgttttgggtcttagaatgaaaaaaaaagagatggagaggggaaatggaaaggggaggggagaaacagcaggagaaggaaagggagggaggagaacaggttgggagaggaggagaaagagaatgttgttgtggttgggtatgtttggtctgaacaggacaccctttagttgctatgtgaacaacacaggtcaagaagaggtaagatagaaggtcagagatcaaaatgtgcttaaaacagagaaaatctgaaaagggaggagaagagtgacttagaaccagagattgggaagggagggacttttgatactcatctaagtctcctaagccactaaaggtaaaagaaggctggcatgaagctaagggaagctttgacattgctttctgaaaagatggagcatatctgtagccatactccagccccaaacaatgaacagacaatattgatgctctctgccatatacatttgcaggcactgaccaacattttgaagtaagtttaattcctacctgcagaaacttcttggagcacccgtgctttctcttcttgtccaaaaacctttcagctctgccccagcaggcaacagctctacacctgaacaaggattgctatcagccagcgagacttacaaaagcaggttccattcatgagcacaggcagagcaaacatagatgtcccatactgatactagccaagagcccagacccttggctgcccaataagacaaacaccaggcaggcagtgagcatttcccagactagagatgggatggctttggggccatgagaagttgctcttctcttgacttttgaaatcatactgaagtgaaaaactcacatacctgaaccagttgccaagaacaatacaaggcagaaagtgctaaaatcatcatagccgagccaaagaatacgatggaaagcaggatgctgcgagctagccatctagagaactctggagttggaccctttgagtgaagtgggagagagaagcctcatgattaatgatgtttaatgcactgtgcattctgctgagaagggcgtttagagcattaggaatagagccagcattttcaacatagcatttactttggattcacttccatatattttgggcaaaagtgagtcatggataaagtatgtcatgcacaaagcagttattctttttttcttcaggcttttgtacaatattatgttcttttctgtgttcgacatggcgggtccatctctgaaaggctcctggaggtacttgcaatgattacagggacaactggggatgactaaggatgtcattatcatggaatgatattatttaacatagttggctatatgggaatgatatcgtctttggatttcttaaaatgatcttaaagttagtttacaaaatagtgagtttcattataatattttacatatatatacatacatgtaataatatgtatatatgtatgtatatactgaaatttgtctttagaataaacaaagaacttccatctttagtttgggttttataaagaatggctattgtgttgaagtgatgaactgagtctgagtctgatggagcaaagctatggacagtattttcagacacatctagtgtacttcccccaccaggtataccaatagcagagtcgccccacagttattcttaaagtctctctaaaattcaaactgaagtgtgtcttgctgctctgcagctccagaatgttccacccagcatggagtcagttgggacgggccttgcacaccagagccagcctgggaccatcttaggattgcacagccacctgggtccatcaccatgtccccaccccctttagttttgcttcactttgatgatgttcagctttctggtggctgtggttctcaggacatcacattcatatagatacatgaccacacaaatgccagcggaatgtgagtcagcataacagagctccctacaaactacagacatcttcttgctgctccccagctgcttaatggctaaaaggatccagtgtctggggactgagacaaatacatgaactattttaggaagcaattcagtcagcattgtggcaggtacatgttcagtaaagtattggagccaaggcccatacaattgggttggatatagtcaatccagcaacacttagccacatagtgggcaaagaggaaagggagatgttttgttttgttgtttttgagacagagtttctctgtgtaacaactctggctgtcctggaactcactttgtagaccaggctggccttgaactcacagagatccccctatctctgcctcctgagtgctgggattaaaggagtgtgtcaccactgtcctgatgaaagggaggtttttaatgtctttggaaaaggacacaaatctgtagtttcttccctttttcagtgattttgctggttgatgatagacttggaagtgatccttctaagaggaagtgcaaaccagggaggaataactctcaccttctagagttgtaatgacctcaaagtcattattccaagatcgcaaacatttcactgtaagaaccaatgagaagtcatatatgatcttttgggttgtctctctctagatcatctccaatttctagcatcaatcccatctctaaaggactgtgatgaaaactcatatatggtaggatccaagtaagcacacatgcacagacacacacacacacacacacacacacacacacacacacacacacacacacacaaaaacatacacacatctccaggtaagcacacatatgcacagacacagacacacacacacacctccaggtaagcgcacacatgcacagacatacacatacttacacacacacctccaggtaagcacacacatgcacagacacacacatatttacacacacatctgcgggtaagcacatacatgcacacacacacacacacacacacacacacacacacacatacctccaggcagctacagatttggttcttgcatgttttccccagttaagaggaacaggaatctacttggggggtggggtggactgtggcctatgggctgaattgttacctttgtgaggtacattccttgtttctagggcagcacagagacaaagggtacatttagtttgtgggaaaggatgggggcaggggaagaaacagaaactagaggattgtgcaaccgtggtgctctcaaatccctccaggaagtttatgtttcgaagcctttggaagagtaaagcacagctgtttcaaacagtgctgtttactgatgggccacagtcttctgtaagtgttctcagtacttcctccccagccctggaagacaggtctctgttagtagactctatccagcctaagcaggcttatggccaccccagcagagaccgtgtgtctccaaaggcaagggatgttcagagagaagactgggccaggactggggtaaagagaggcagcctgctggatcacagcaaagtcaggattccttgaggcatgtaaaccagactagacttgctgtggaaggccacaccccagaaagcccttccgatgaccagccagggcgtgcatgcagtacggaaccttacaaatcaacataccaattttggatgtcttgtcatctgcagtatctcctttaagccatgagtgagttgataagatgtcgcttgaagctttctctgtgtacttaataaatcttcactggtgacctcttgcctcctccctctcttacactggagcttcaaggccgacatccagagatcgatctatcaacctctaaccaatgatgtcaccattctctccctgccatccttccttaggggtcctggatgtccttccccatgccctgggcatgctgtacatcttcctagtgctctttcttcttggctgtctctgcgctgtgtccagagcaatgtagatgaggcgtggtgaaagctgagagagaaccgggagcttaccaacaatcaagaggcagagtgctggggccaagttggtgtgtgctagcacactgctttgtggccttggtatgttctgtttgagaagagattcttaactataaagcataggaatttagggctattattgggcctctgaggtggagccctgcctggcacacacgaggccctgttcaatccctagcacttccaggaaggaaaaagaagtggaggaaggcagacattcatttggatatttttatcaaatgagaggtttttttgtttttaagagcactttcttccttgaaaaaatatttgaattttcatttgtaacaggtttgtgtaagataaataatagtttatatgtattagttatttgagttcttgcaatgacaaaagcaacttaagtagagaagggatttttttcaaaaataatttccttattgattctttgggaatttcacatcatgcactctaattctgctttcctcccaatcccccatatcattccctcaccccttcagtgtacccctaaaagacaatttaaaaaaaatcaaaccaaaacaaagcaaagcaagcaagcacacaaacaaacaaaaacaagaacaaaacaaactcaaaaagcctcttccctgagagaagggcttcttctggctcacagtcacaggatgcaatctggtgatgctgaagaaggcatggcaacagttggttaggctgcttaccttgtatcaacagtcatgaagcagagagcaatggatactgatgctcactcaactcactctcctttttatttgatccgggaccccagcctacagaagggtgctgcccactttcaggtgggcctccccgcctcatttagcctaatctagacaatcccagatatacggccagaggcttgtcacctaggtgactctagatcctgtcaagttcacaatcactgctaaccatcacaatacatgaaaacatttatgtagctaaaagctcaccatttccttccatttttgaatgaattaacaaattctctggactatttcgactgtgtctatcagccctcaatgaaagatgcatcttgggaatcctccttccgcactgtcaatgcaataaaatgctttctggaagctgctacctcccctacacctcgggacatggactgtgccatatactcttcgcattcctcccttctgtcccatgtcacccaagttatccaaaggtccaactgtgcagctctcagcttctccattctgaacccacccttctacatttaaagccatgtcctcactagtcatccactcattagtcacccaactaataccaagttgtgctttcttgggccctgattcttcttttggcaaattgacattgcatttcctgagaaactctttcacattgggattttaatgactatgcttgtcccttctcaacagtgtttgactaggaactttaagagattctataccacaatctatgtgtgtggtggaagaattttaccctagcaaaggaaacacttcaaagatgtgaactttgagcatcagttagatttttgtgtccaggtagttcagcccatgtctactatatctgtacatttgatggatcttggtgatacaactatgattagaaacctctagaaggtggggtacagcctatttccaacatgatctctccaaaaaattctgttggtaaagtgacatgcctcaaggatttttgcttggggtgtgtgtgtgtgtgtgtgtgtgtgtgtgtgtgtgtgtgtgtgtgagtgtgtgtatgtgtatgtatgtgtatgtgtgtgtgaatgtatgtagtgtgtgtgtgcatgtgagtgtgtgtgtgcgaatgtgtgtagtgtagtatgtgtgtgcatgtgtgagtgtgtgtgtgaattgtagtgtgtgtgcatgtgtgtagtgtgtgtgcatgtgtgtgtgaatgtctgtagtgtgtgtgagtgtgtatatgtgaatgtgtgtatgaatgtgtgtagtgtgtatgcatgtgtgtgtgaatgtgtgtagtgtgtgtgtatatgtgtgagtgtgtgtatatgtgtgtgaatgtgtgtagtgtatgtgcatgtgtgtgtgtgaatgtgtgtatgtgtgtgtgtgtatgtgtgagtgtgtgtatgtgtgtgaatgtgtgtagtgtatgtgtgcatgtatatgtgtgagtgtgtgtgtgaatatgtgtagtgtgtgtgttgagaattgaacctagccccccatgaatgctaggcatgcactctatcatatgctgcatctgtaaccttcagttggatctctctgtcttcatggaaccacacatcaccttttccaccccgtctttaggtatcccttcagctatggttagtgactgccttcaaaccttacttccccagtgtttacttaatcactaggcttgggcaggaaatgacctcaaagaaaatctttttgtagaggagggaagtgaaatgtctaggctgagctgtcaaagcgagtcaatgtcagaatcagctttcagtgcctgtcgctccagtatgtggacgtcactggtatttatgtctgagagcaaagtctaccatgcaagtacttgattggatccctagttccacttctgactacgtgtgtgacctagaattgttactcagtctttaaactcacttttcttatctagaaaattgagggaaagtgtacgagtactgaaagaacactaaaacgaattattttgaagaatctgagacctgtaagattatttacccaggtgaagaccttgcttagctcaatgtctgctgcaaacgtactgagtaaatgaccattggtgtttcttcttccataaccagggtgtcaattgctccttctgagcctgcttctatgaccctggcatctcacagagtggggacaggctgcatctcacagtgtgtgcaggcctggacaggggtggctggagcaatagaagaatcggatgggacaagtttttagtggtttttatttttgttttttcaaagtagtggaaagtaaatcaaaggtgaaaatgcaaacctggaaaaagaatggattccattgttctttactggataaaagtcttcaaacactgctcattctgaaatgacacacaagcaacacggctgactctctgggccagcctcttctctactattgatggtggccatcttgggtttctgcttcatgtgggtttggctgccattattgtatgagcaaagaagacagacagcagagaaggctgccgaagccctgcccctgcctgtaatttgctcatcactgatgggacatctagactctggagggacaggattagaacacttggttagtaacagaaccaagtgttcacactaacatgagcagacagaaagtcactctaaagatggcacagtgtgtcacagatcacagagaaattgcagagaccctctccactctgcttcttctctctaaagcactgtgactctgcaacagctcccaaagtcagtgaatcactaagcagccagactagtggctctagtctactttccccaagtctacaatcttaatgcacaatcggctggcctagcatgggtcaggttgctttcctgttagcagtcagccattgtgaatggcttccacttgttctacagtccattctagccacatgtcccatatgagtggacaagctgggcaatggacagagatggctggaacagatcttgatgaacaagatggcaaggaacacaattcccatggggtcctgctctgcatcaccccattcccaattctgccccaattctcctacattctaaggtggttctgtactcattgccattagcccccttcctgctaggtgaaccttgaccctagaccagctttctgaaatcaaacagggtggaaatggtaggctgtagacccaaacagacctgccacttactagctctgtgctttggttttcttacctataaaatgcatacctaatgtatatctaatgattggtcaggcagatgccaaggaataaagtcattatgcttaaaattcctggcatatatggtatatctagttctatgaattttctttgcttaattcagaaatcttcaagagggcatgggggtacctataactaagaagggaagggagagaaatgatataactttctgaatagcatgttaaccttggcttctttgcaatgaccctaagcagacattaaataatttaggtctgtgggcagagtcatagaagccacactgtggtggatacagttcttgctttagagacaaaccagctgtttgttcagtgagccaatgataaacatgttatcctctgaaaacatttgttgggatggctccatggtccttcaaccttgctctgcagatgtgatactcccagagttcagtctgttcactaggtaagtgaatgcagcaatttggcattgtgacctgcacagacatgctgctgtagagagacacacaaaacacagcaagccatcaacttttcctaaaaactatacttcataaagtcacttcaatgagcattgtgtcaaatttttagatacgttatctatttcctttctatgagaatttttccagattgatgacagcactggaatgtaagcttggctaagtctgtcccagcaccttttctgataacacatttgcaaaactgcttctcagcaccttggttttgttgaaagggttagtggctgtggtgtctgaatgaggctgccccacataaacttacatgtttgaatatttggtccccagttagtagaactgtttgggaaggattacaaggtgtatccttgttggaggagatgcattactaggagtggtttttgaggttccaaaagtcattttctctcctttctgtctttcagctccagggatccttgaaaagaaaacaaataatcaacctgcctcctgccaacagcaagagacccaatggctttgttgacagctcattccttgacattaaaaggatcagggttggggagaacctttctacaggtcagggggccctcccagtaaataatggacaaagtcatatgatgccgggggccttgaccatgagccaagcacccctgagaaagactaatgctctgccccctcctgcacattctcctggcaacactatgtttaacatgggcttaaaggaggtgaagaaagaacctggggagaccctgtcttgcagtaagcacatggatgaccaaatgacgcaagagagtgcttttactaataggtttggggatgaccctggagaacaactgatggaccctgagctgcaggaactgttcaatgagctgaccaacatatcagtgcctcccatgagtgacctagagctggagaacatgatcaatgccaccattaagcaggatgacccattcagcattgacttgggtcagcaaagccagcagagtacacctagacctcccctgcccatggagaagatcattatcaaaagtgaatattcacctggtttgacacagggcacttcaggctctccccaactaaggcccccatcagcaggccctgcattctccttggccaactctgctctccccacttcatccccaatctccacagtcccccagagtcagcctcagcctcagacagcatcaggagcaaatagggccctgccaagctggcaagaagtatcccatgctcaacagctcaagcagatagctgcaaaccgccagcagcatgcacgtatacagcagcagcagcagcagcagcagcagcagcagcaacaacaacaacaacagcagtcccctcccagctggccagccctgccatcctcttccgggccatccccaggggcatttgtgcaggaaaaaatccccagtccttcctttggccagcagccattcagcccccagggatcacccatgcctggggtagccggcagcagcaaccagtccaaagcagtggccaactatacttacaaggctagcccctcagcccaggctggacacctggatgtgcttctacagcaaaagcctcaggatctcagtcgaagttttattaacaacccacacccaaccttggaaccccgacatggcaacaccaagcctttgttccattttaactcagaccaagcaaaccagcagatgccttctcttttgccttcccagagcaagccttctctcctgcactacacccagcagcagcaacagcagcagcaacaacaacaacagcaaggctcattnnnnnnnnnnnnnnnnnnnnnnnnnnnnnnnnnncaccccccccagccacagagctccttggtagctcagcaacagcagcaacaccaacagcaaggctcaatggcagctcagcagcagcagccaccagcccaacccacccaacctttatcaagtcagcctttgctaaggtcacccctgccactgcagcagaagatcatgcttcagaaaatgcagaatcagtccattgcaggcctgggatatcaagtcactcaacagcacagacaggtaagggctttggttctttaccccagagctcccacagacaattagtttggttattatggcatactctcatgcttgtggtgagacatgagtaataccagaaacccaatggtcctagcaggatcttggttctctgggtacatctagggcaagcactaatgtttccttatatgctgtcattgctttggggccctgtgatgatcaacagttcttatagctaatgtcttggtgatgtacccaattgtccatcagatcctgatattattggtgttcattcatccaaccagaaaatctgatcaatatgcattgaacactactatgtagaagacattgtggttaaggttgaacatagaataaggttagagatgacattgagagtggtcaatgatgtggccaactgttgcattcagtcctcagcctctctaatagatcccacatgactcaatgctcacaatgttcaccaacccaaaacctcaggttccgtctagagacagagtcaagcacttaaactatcattttaatgctgcatagaaagagcaatgacgtgagaactctaaagtcttccccagcaagtagaaatcaggaatgactttcataaagaattatgcctgggaggagtgataaagggtgaaataaccatgactatagcaaaataagaatctagaaatagaaataaatccatagttatcttatgccctttggttttacattaaatagaggtttaattctatactggtaaatagtgtcaagaaattggtcactcctccagaacaattactggtaagtgctgatcccaggggaggtggtagaggaatctcttcctggaaggaaggaagaagtttgaatatttcattgttcatgttgttggcaggcgtgctttaccatagggcagcaagttgcctggtagagaacggaaaactacaggctaccagctggaagagtagaagattcagcttccctgcccaacatacgtgtgtgcgtgtgtgtgtgtgtgtgtgtgtgtgtgtgtgtgtgtgtgtgtgtgtgtgtgtgttctaattatgaatcatggaatagacttaggtagacttgtatatattttacaacattaatatgacaagaatagtcacataatactttcataaaacagacaattttagatgacttaaaaagatagcagagaacatccttccaatatcacattcaagcattttgtcctggatgatcttgggttcaaattctcccttgacactccttgtgagcctccttaagctacttgtagaatctgctgggtttgtatggagagtggaacaaggttattcctaaatgagactacacaataagtgaggattattcccattctcatgtcaagtgctgtaaataatcaaaatatttcctttaaggaagcaagcacacatgaaagggaggtctcagattaacatacaccattctaaggacatggattctgaaatgtaaagagtaccacagtagccaggtggtggtggtgcacccctttaatcccagcactcgggaggcagagagagacagatctctgtgagtttgaggtcagcctggtctacagagtgagttccagaacagccaacactgatattaatccctagtaaaataaactgcataaaagattaaggtctgtgaggacagaacatctctgacttcttgccttcagagctgttaacaaaaggacttttttaaaaaatctgtatcaatctcaagcttcctgatgataaatcttctgcagccaaaaggaaatatatgtgtggtactcccaccaacagcatctccatcttcctagacccactgctggtatcaccaactgtgcacacctcttcatcctcatctctccatccttcccaacttccagggccttagtacaccaatgcatgctgacagccaaatcagtaaccatttcccagtggttgagaccatttccacatttctcaatgagtatgttaagaaaatattcatctttaaaaacaacgttaagaagtggcagacatgctgagagcacttcaggctaaaggtctgtctttcctacacagcagccaatggcttttcattgaatggctcagctcgacttactggcttatcaggactcaattttttttccaaagatcttccctcttgaactaaaaatgcattctttcccaaagccatatggccagttgcctgaaagtgtgaatttttctgtcctaacactggatctatgcaactcaaatagattctatatttggtttagaattctccatgtctaaaactcctaggagggaattcagccagtaaatggatggtttgttgtgactgaaacacaaatttatacattcccccttagtagaaagccaagttcctcaatcaaatcctaagagcctcatcccactctccctacctaaccaagaggatcctccacacttctatcagccagtggtgtaaatcaagcaatagcctgccctccttcccaccttcttatagtaattttgcatatgccttaaatacaaatacccagaaaactgttttcaagatgcaccaagtactggagaaagaatcagcttatctcttgaattctgacaatacttctaaacattagtagccattgaacatgcagataggggatagaaatcttgcatcagataaaactcctttctaaatggaaaatcatcttgaattcaaattttatagaatataacacccaagcctctgctggaggctggaggttatctgaaggttcatcaccaggaactgagcttagagacaagacccaggttagaggaaaaaaggagtttaaagaatgagcagcctaggaagcaatcagtagagagaccagaggaagtgacaagtctctggccaaaggtgagtgtaaagggtgtgagatagagaaagaagataggagagagcctcaagagaagctaagcaattactgccaaggacctgtggccatttggtggcttcagttatgaagtaccatggctacatcttgccaagaaggaaaaaagttgatataggctaattatgggctgtcattggcaggccagaagcattaatttacattttcattttatcttttctattttatcatttatctttgaagcttacaaagaaaattttgttttaattctccatgaaactaatgcctagaccaaaatacaaaatgaatttctagctgtaattctgagcaagtgttttgaactttcagaactccagggtagttcactgacttgtcttctccaatttcatgggcttgtcaagtctcttggtttgtcccaccagaagtctagagtcaaggattccaggttaaactcatatctgcttcattcttaacattggcactaccttgaattcaggcatccattcattcaaaaaatgcagaatgcctactgtgtgccaggcacaattttggttgtgctacaaatgagagcaaaaatgaaatctagaatcagtaatgggtgcttgtaaagttctctctctctctctctctctctctctctctctctctctctctctctctttcttcttaaataaacaggtgaatattttaatgaactatttccttttatggttcctaggctagtgctgcatctaagataaaaatgacaaaagaacagtgtgtgtgtgtgtgtgtgtgtgtgtgtgtgtgtgtgtgtacgcaggtgtgtgtgtgtagggatatgtatgcaagtgtgcatgcatgtggcagccagaagtcaacctctggtgttgttcctcaggcactgtcctgtcataggctggcttgccagaaagcctcagggacccagctctcaccacctccatagctttggtattccaaacacccctggatttgtcatgtgagtcaaactcaagtcctgatgttggcacagcaaacggttcaccaatggagctgactcctcagaccacaactttaatgcaaagattttgagatttggttagatgttttaaatgataagaaaaatgttttatccttttgcttcatccattagaatttaagagcttgttcagagccactcccagtttcatggtaagataaaattgtaattcttccattcattaattcatgtggtgaaaacatatcaagcacctacagtataggagaaactgaggattaaagatcaaaagaccctctttctatgcacttagcctaaattcccaggaaggcatggacctctgcatccataagctttgggaggaaggcttatttcttcccagctttgtggattctactagactcatacaggacttcatctcagtccttcataatccatcatgagtaaaaccacacagacctttcttaagccatcacaattacttttaatcatactagtgtatcctttgacagaacagaatctatttgctgggtacccattttccactcaattttattatattattctggtggtttttttctcatgacaaaatggaatgtattagtacagagcaccaactcctgtatccattgatgaacaaataaacacaataataggggaagatgtcagcctcaaagcataatacataaggcccaactctacaatcagggaaatcgcttcttttattctcatttgaagaccttctggagtggcatgtaatcacaggagtgatgtgtacttaacattagggactcatttagcctgttgaacaccaagttctgaactaggaaaagagagggtatagggttaagaaatagatttaatcctagagatggaaatgcaaagggttaatggaaaagctgacagatatttcaatgtgatgtgtatccctgtacaacagtctcctctgcacctattccaattagtcttgctttttctagtcagtttcctcttcctgctgccagttgctatttgttgggtagagggctttgtagtttcttttagtgtaatccaaagaaatacaaaaggaaaaggacatttagagcattactcagtaaatttgcatagtcatagttcattagaaacaagaacaaagaaatgtttagcctgctggggtgagagaggtgtcacgtgagtgggtcatcttactgttctactttttaaaattgagtttcaccatggaagatcaaatttacaatgtgcattttacacacacacacacacacacacacacacacacacacagagagagggggggggagggagcgagggagggagactaattagacacctctgaaagaaattgatgagatgaatttgaagtttgttctccaggcaatagatctagtggtttgtaatagtaaaagctgctgtcctgtatgacctgtaaaatcaaatttccaaagtctcccaggatgcaagtgaggacgcggctaacttctttctctttccattcctccgtgaattccctccacccctgattcacagcaaactctacatttgtcttctcatggaacctgagcttctgccccagcaagcagggagctctggtagcccctgcttggtgtttcacaggtcttcaagggtaagcccagaagtgtgcatacctcaggatctgcgctttggttcacatctctactctggctctttatccaattaccttcctctgtggttctactcttctttcacacttcacttattgagcaatttaggcctagcctcttctgtaacttccccaaggcaaccctggaaaggtacaggagcagggatgatagacaatgaactcattattggcaatgaagatcaagagatattacctaaagaacgatccatgttaggggaagccatgaagctgaggtgttggcagctcaccaccatgtcccgcaaggctcaggcacaaataatgaatgctaaatgaacatgcccatgggcacacataccctgaatgctttctggccttagccctacctgcttcctcctggtcttgccaacatgcaacatgaatgcttaaagtgatagttggaatttacaaacttctcattgctcttcattttcttgggataaatcctaatttcttatgttgcttccaaagccctgtaggatccaacttttccccaaacttctggacttacagcttccattcccagccttcttcttcccttgacacccacccccacctctcctgcatacataggctgctctctgctcactgcatagagagtgtcccttgactcataaagtgatgcactttctctccttcccacctgcaaggtccttctgccccaaataatattcttttctactctggccacccagggtttcttggcctctcacccattttgctctattcactcctactttttgtcctttagtgcacaccatccttcatctctctgttggctcatcaatgccttcctaactagactgcaagctatttgaagacaaagattgtatctgtgtcctttatccctttactctgatccctaacctaccttccatgttatagggatcccaaacataaattttctgaacaaatgattgatccagttgagccatcattctttctgctgttctggacagccagagacaatgaggcacggccttctggtcttcagatagttagaacatctggcccttgcatcttcttccactaagtcacctttaaactctgtctacccttgacccacagacctagccttcaaattcttgttttcagagcaggaaaccatggcattccctctcagctgtcctatgaccaagctggggtgtgagttttgaagaggagatcttaatgaaagttagacccacctatacccaagtgcccaataggaggattttatcaggatatttcaagagcttgttctctgccatactggaggaagtgagaagtcatgtgaaaactgtgtgggttgtttgcaaacacaggtgtaacgtgtacccctcacaaggtggagcctaaatgttgactcatgtttgctcttagtccagctgctacagtctagagaagcccggaagggcctgagccagggacacaagatctcacagtaacaataggaatgtaacagagcctctgctgtgcagttgcagtgggtctggacagcacttgctaactcagccattctccctactctctccattggccctcatacccctcttgcagcccagtgtgagtgtccagctgtagctctggagggcttatttcattggcatgagtgtctgatgtctttactctgtcattttgacctctctttaaaaatggcaccaaatccttcaaaacccactttctaatcagtccgttgcctcactcaagtcccttttgaatgaaagccagcatgccagtggttgttacacaactgcacagccgtgcctatctgtctgctgctgttgtccacatgctattgcaattctccctcagctcatcttttttaatatttttcttattcttgaaattaagatataatgaaattaaattaaaatatacttaaattgattaaaattaaaatataattgcatttttccctcttcccttctcttctatggacccttctgatgaatctcccccctctcaaattcatggcttctgtctctttaattatccccccttacacacatgcatacacacacacatgtgcacacacacacacacacacacacacacacacacagtttgaagtatataaacacaacctctatgtttgcagggctgacttcttggtatcgaataaccaattggtatgcttttccctttctgaagaagactctttctcccaaatctaatcattcctcagttgcctgtagttctttgtctaagactggggccctgtgggatttcccccttgcccatcagtgtgtcttctgttggtatcatccttgttcaggacttgtttaggcatccatgttgatgactgtagcatctctgacatttctaagaaacacaatctcacagcaaacttcctgttttcctggattttacaatcttttcacctcagatgcgttgtagatatatcagttgtgggtgggtaccacataggtcacttgttctctgcatcttgattggtcctgcttttctgtaatggtcttcaacctccttctcttcaactactgtatacctccctatagtatcaagacagtaaacaattctcccttgctccaaactcctgaggctgaagccaggggctgccttccaatgatcactgcaacttggcaggctcttctcatgaacttgcctccagctttgccctgggttccaataatctctgcaacttggcaggctcttctcatgagcttgaatccagctttcccttggaggtagtctcccctagggctctgctttactacttcagctctcctccccagacatgccattttctaagtactgcctgatggctgatcgctgtggcctcctatcatcttaggcagttatgcacaggtcttaccctctccagagtcatctctgagtgccagtgtcactgtgatacccctccccaaacttgaaaatggcttagtttctcttctgccagggcccaccatatgcgaccatttcatgagttttctcatactgtactatcatttagttaggtcaaccagagggtcaacagaattgtagttttctagaaatttcactaaggattttttttctccacctaaacaaagcctgccatgtttcttaccacactcattgacttctactttaaattatgcttaagtccatagattagccccaaacaaggctttgaaaatactagaaatcagagtctatatgtaatttaggtattctcttgttttagtttatgtctaacagataatagtatatctgaaataaactgtcaacttatgggcagagggagaagaaaagggaaaagatgtcactttcatcatttttggttgccgcatgtgctgcttgccatcctatttccaaatgcatccatacttgatactccctgatttatgaagtttaggaaatgggtgtaatgtcccattgcaataggtaaagagttcttgctgttctgtcannnnnnnnnnnnnnnnnnnnnnnnnnnnnnnnnnnnnnnnnnnnnnnntgttggtggataaaaattttgactgttttcatcagtgtctttaattgatgaacaggtaagtattgaatactaagataagtaacatatcataattataattcctatccgcaagttagatgtagagtaccacggcacattagtggagtaccctcgattctctagctgaagtctttgtgtccagcacacagcactatgcagtaattgattccctcttggatcatcttatcatccatttgctcacttccttcctctgcatccctctccacagcagccctaggtctctagtggtaccccagccgtgctctctagactcacaaacagaacttatattgctattcacagcctgaacccctacatgcaattcccccatgggggaccctgtttcttgatctcttagtttttttgcctcttagaaaggctcttatttggtggactgtgtgctggtagctaactgatcaagggcatgtggaagggagaagcattaatactccaacggctggggctactgctcagtgctggagacattacataacatgggaaaagccctgagtttgagcctcaccacttcaaaatatttttaaaattaaaagtataaatgaagagctgtagagatagctcaggagttaaagacaccctgcccattactcctgcgggacaccagagttccgttcccagcacacacaaaggcagttcaagacttctgtcactccagctcacaggaactaacacccttttctgtcttctgcaagcatgcacacacacacacacacacacacacacacacacccacacacacacacacacacagataaaaataaatcttaagaaataaaaacttcaagagaagttataaaccatttgagggaagaagaggaaggggaggaagaggaagaagaggaagaggaagaggaagaagaagaagaagaagaagaagaagaagaagaagaagaagaagaagaagaagaagaagaagaagaagaagaaaagaaactacttagcatagataccatgatagctatatgttaattgccgcagtcagcaaaacggtggagaaataagcaaccctcacttatggagtgccattgtgtgcccagtgcatgctccaagacattcctaagaacccagagcagttgtcactcctaacagacaaagactttgagaccagagtagcctgctaattgacttaatgtcacaaggtaagcaaataacatagctgaatttggatacatgtttgtctacttttgaccatatgccccacaccggcatcttgttgccaaaaggcctgcaggcaccatgcctgccctcaagctggctcaggcctgaccttaatgcagggtcaaatagttgctactttattgctccctttaactccctttagtgtgtgtgtgtgtgtgtgtgtgtgtgtgtgtgtgtgtgtgtcactatggctaatgcaataactactccatgtgcatcaaatttctttattatatgtttccatgaagttctggcaccaaattatttccaatagaaatttcagttttgaatgttccccaaccccttagttctcaggtgttagtcagttgcaacctactctggttataactggaaaaatgtattgatggtcttcctgacaaactgtgggttctacgcctgttggttcatttgctgtcatttagtacattatggccctgtttaagggacatccaggctactgattgggaatagactgagcaagaataattcttgcactgaactaagccagccactcactcaagctcccattccttgaagtctgaactgataagtttccccaaaacaacagaaaacagcacacagcagaagaaacatatggagttaaaaatgggtgaagaagatgggatcctcaactgctgtctttaaggggtacattagttgagggtctgatgggccagcaagttcagtcaccgggaacttactcatgaagttgaagccttctgacctctttctcacctgacccttcccatcactcttctcatcaagcactggaaggggacagcttgctatgcacactcttagactctagatactgtcccctgctagtgtcctggctgctgttccaacatcgctttcagaggcagaaactcgagcaggtacctgacctcccaacagcctttgcttttgaaacttctccttcttttatttatttatttttgttgttgttgttgctgttgttattgtttgtttggttttagtttgggagatgttgagacggggtttctctgtatagtcttggctgccctggaacttactctgtgaaccaggctgctctagaactcagagatccgccagcctctgctgggattaaaggctctttcttaactagattctctgacacacctcatgctttcttttaccataggagccacttaaagaaagtctattgagtccccaggctagccctatgcaaaagtctattaactcacaggaccgtggcacttttatagtgctgtgcttgctagaatgttcagtgtttgaagatttgtttagtgttcattgattgatccaagcactacggtggtgacaagaacatgatctttcatgaaatggagacttctagaatagggagaaatgtgacccccaggtgtgcacagagtattgtggaaacctcagggcaggggtacctaccttaccctgggaccaacatcaccattatggaaaagggagtttgcctagtgttggagactgccgtttttgtattgtttttgtggagattaaggagtttggaaccatccactctatttccatagtctataaaaagaacaatcaataaaggatgcatagtgtccccagccacctggcccagcaccatccccatgctgtaaattcaactccacatcaagcctggaagacaacttctgagcaagcagtagtcatctcacaggcaagatggtgtcagagagaaggctttcatgtggtggcaagaccagagtccctgcatatgtaaaggcagagcaaaagcaggggttcagaaagacagcacaaaaggcaggaaagagaggtcccaagagagaagcaaaaggaaattgggtcaaaaagtgcatttctgatcaaccctcctgcttacagatactttataaggcaatcttagctctggtggctttcctgcctctgtttccagatccagataaagtcagtcattcccacaaagggctcaatttctttcctctttatgctacattcaatgtttttgagtggaagagaaggatctagttctgttcttgctaaattctgccacatttttttctgattgcttgaaagggagccacatttaaatggacatgaactcaacatggattccatggcccaaaggtcaggccccagtggaagagttgtgatgtgtaagtgctgccaagagtcacttatgcagtgaagccttgagggctgaggaacagtcatgtgactctcactcctcaccctcagagttgcagagactggagacccctctatggcccagcacgagtatgtgagaaccttgccaggctgctccttggggtgtgaggcagccctgaattccatgggaatgagcatctctgccaaattcagagaccaaagttcctcttgggaactgaaggaagtggctgtgagagctgagcccacatctccaagacctggactcacccccccccacacacactctaagtcttgtgtgagtgtgtatgtgtgcgtgtgtaagacatagatattacataatttgctgagctgggtaatcacacacacacacaccaaaagaaatcagctcctcgaggtaacccaatcacaaaaagacaaacatgatatgtactcactcatatgtggacctgctttatgatagtagtgaccgtgctttatcagagctgtttttaatgatgttgctcagaatactttccttccaggtgatgattgagaagctaatttaaatttaaaaaaaaatggtgccaggtaccacacgagtaaaaaaaaagtcattatgtatatggacccttttccaagtaagaaaaaattacttccttgataaagaatcatctagctggctcaaagtcaatgcaaaaaaagaaaaaagaaagaaatcggctccctaacattgcttatgtggaatcaatgtacaattttacatgcagaaaacattaagtcaagtaaaaatgatacgcatggtgtctctgcttatccttatgaggccaatatacttcacacccatgtcttgtgctctgactgtcatctccaaagctcagctcagggagtatttcaaagacctgaaagatcacatgggccatcaatagagttggaataacttacagagctctttccacccggcatcatagtgaggttgacaagaaaatgtaccaacacaaattccaaaggtagacatggtctcacaagctgagctgaccatccccatcagcacagaattgacatgtgaacacagtggaaggtggccatctctgaacatctgttgagagtgaaaacatttttcacctcaagcattatggcaggcacactggtcattctgttccttgtcacaaacctcattcacttttacagtaatatgaaaagaaaaggagaacacagggaaatccctactggtcagtcaggtttccctgtagtcatcacttccctaggaagccagtcagacagatccaccccaaccgaatcccccctccccccacccctggcccagatcttttcacccattgcatcaacccttccagaatgatcttccttctgtcacccccaatccccagtccccagcacattccctagcactttgtaggcacttaagtatacattcagtaatgggtggagtgctaaggaattgtgtcaggtcttagaggacactaaaatgaacaagacagagtccctgccctgtctgagcatgagacaggtagacaatgattgggcattctacagtttgccaagccatgcaatgcctgtaagtatagcctccttaaatgacaacggagagaaagctgaattatcagccacatctactgcttgcccaactctgtaattcttcaaaaaagaatcctacttcctactgtctgatgtttgctactaacattggttatctaccaacactaactgacagctgatacagtatcagtgctaccaggctaaggtttcaacctggggaagagcatagcaggaggaacccaagaagtagcatcaatgtcttcttgggaaatctacttttcagctacatgacaaactaaggttgagcctcaaagtctcagaactgaatgcaagtccatagttggctttgaggtaaacagtgaaattaagagccaggctcagcaacctggttttcttttgttgccattgcccctttcctatcaatgctactctctatcaacctcccccacaaaggaataatcaaaagcacacttgctcctcccactctttggcccctgttctgctggtaacattacttattgaacatccttgtgtacttggctgacagacagtaggaaggaagtgaaggatcttcccttggggctgctgattcaattagaggccatttagaaggataacatgaaagctcacacagaggaacccagctcggttgttgctgtgtgagaaactgctggggatctttatcgcactggaccatcagtcgtcctgtagagtggtctgtctctccaggctaaataaagacaaaactagagagcccagcaaggagtattggcacatgcccagaatcccagaattctggaggctgaggcagaaggactccaaaggtgacttggactataaccacaggcataagtggggggaggtaaagagaagctggaaagatgtctcagtggttaagagcacttgctacacttaaagaggacctgggttctattccagcacccacatcacgtgactcccgccgcctttaacaccagttctgggagatctgacatctccttctggattctgtaggcacctgtacacacacgtcacacatgtatatacattaaaaataaaaagatcatagaagtcggggagtctatctagtatatagaatcccaagtagagtcagttgaaagagtaatgacctcaggtgaccttgaagccaccactgcgaccttcacaggaagagcacacaataacctccccaaggacagtctattgaacaggttaaatcattttttttctcaatttttgttcaagagaaattacattttgaaatgccaattagaactatcatacggcaaacaaaaccaaacatgtaagagaattttatgaaacatagtttctgcaaactacttggcgtggcagcacagcagcaactgtccgtcatgtgactctacactttgaaaatctgagcttacccagcgcacatggcttcagtgccattgactatttgggtgacccattaatctgtttacctctctgccttcgtttttctaaatcttcgataaaatacgcgatccaaccagtattcagtgcactttcccgctttgtgataggagagctacatttcgtttctgtgagtaaacataacaaaaatcaaaacagctactgcccactcatgcctccatttcaggggagaaaatacttgttagcatttttaaaaattgaaacataacctttaaaaatgagtaaattgaacaatttgttaagttccttgttcagaccttgttcagtccctccagcacatggaagcaccccggggctagagacaggcctgccaaacatcctaagaccacatgagctatgtggctcttctgcctgtgctgttataggtgtagccaagtaaccaaaaacaatagacattttttttgcaagactggattgatgtgttttgcccaaaccacagaagtactagatttaaagcacaaacaatacaatgcagttcatttaacttactcagtgttgtgatagtattaatgctgtaatcagattgcattgtataaattacatacacagtctcttcaagattgaacttagtttccatgatagttttttttaagtcctcacagattggagacataaatatggaaatttatggttatcaatattttgagccaaatcctaagagaagaggtttggactgaggtcttaaagtacttaactgaaatggagccactgagaaacaagtttaatcttggagacttgtgtgagagggtaggccttcagattcacctctgtgtttcctttggtagtgagggtccaaagccacagctttagatacagtcactttggcttgagaaaggactcctggcccctttcagggctcattttgtagtaaatctagttttatgatgcggtaggccttgtgaagaattccccaccctttggtttctttccttttccttcttgctgtatacaaccctggcacttggagtacaagtagcttatttagagatgtaaatgttcaaatctaggctcagactttcagaagtagtttgagtcttggagatcttttccaggaaaatcattgcttcctttttaacatatatcctaaaagtctattcactttcgaacaacttaattagatctgtgatctaattccaggttactgtttagaaccatttacatctttagtgaacctctggagtttgggcattagcaactgcacagaagcaagcagctaacatatgccctaaagtgagttttaactgcacagaatgtggcccttactttgtagctagaattgtccttggcacatgggctgagcaagagtagtacaaattggcaattgcaaaaccgagtaaggaattgagaaattctgtaactacttgacaaaattagttcaagatagaagaattcgatacaactcaatttcccacaaaatctcaccttctaagttgtttttccaaaatttttagtttgtatatacctttagagaatatggtatatttgatgcagcatgcaagacaaatggaaaaaggattcctaacttacaatatgctgaggaaactgcctcaaggggtgacttttctatagctgtgactgttcagatggacggcccgtgaaagcagcaaatctcccaagtggccagtggcagtgcatcatgatggactcttctaatacatctctatactctatatatcaggcaaacacaggaggagctgcagagaaaccaacaaatagggagggatagggacagagggatgagaattggtgcctgggaaagaaaaagggtagaataaaaatccagcatgcataaatatccacaggtcttcaacacatcagaacaaaattcatacacgtacatcaaaatcagaatcccacaaacttcctactaccttcgcacttgagaagcccagggctgtgcatagctgctcctagtccccaccagcagcctggctgtcctggaggacaggagtctgaaagctccatgagcaggaagagcagtttaccagccaccattgcaagctgccctaagactccagctggtcaatagcaccaagttctacagggggttacactcctgcattcccatgttgccatacctgttcccatgcattctttccttacctaaaacaatcccaagtaccagtgtctatgctggcaaaaccagcctctctctgaccacnnnnnnnnnnnnnnnnnnnnnnnnnnnnnnnnnnnnnnnnnnnnnnnnnnnnnnnnnnnnnnnnnnnnnnnnnnnnnnnnnnnnnnnnnnnnnnnnnnnnnnnnnnnnnnnnnnnnnnnnnnnnnnnnnnnnnnnnnnnnnnnnnnnnnnnnnnnnnnnnnnnnnnnnnnnnnnnnnnnnnnnnnnnnnnnnnnnnnnnnnnnnnnnnnnnnnnnngctgaatcagcctgtatagagttgatgctaacattctccataaggaactgtactgcctcccgccccaggaagcccttctaatgtttagttccatctgactatactattttgaatatatggctggataactgaatataaactaggggtacagctcaagcttatactagccttctccattcaggaggcctctgagccctcaggtactgcctagaaggatggttgtcctggcaagtgcattcaggtcttagcaacactagagatgcagaactaacaacagattaatcagtgaagacaacagtaagcaacaatgtcagagaccactatctagcccctggaaactaaaagataaagtgaagctgccctttgtactgatcatgcactatgtgtatcctacagttgcaaggtaaatctataatcttaattaatcagctattactggctaaggaatgtgactttttttctaggccggggctgactgtgtagcccaggcttacacagaccttgctgtcttcatgctcacatcactcagcctcctgggtgatatgattttatgtgatttatcatgcatttgtatctcctaaagtggatgtatggtttctctaaaattttctttaattaaagaatagagatacctcaaataaatatctgccttaaagagagtttttttaaatatcaataaactttattataagatacattacaaataaataaaaacatcacacacccaaattagccaaatccagtctatacaacttaatgaacttatatgtgattagaactagcattcaaaacataaactgtgaagcttctcattaaattttacattgaatttcagaatcaaatatattttatgcacatatccaccactgaaacaaacaaacaaaaattccatgacagagttagaactacaaacacttagctttatgtcctctttcataagactggactcacgtctactacctacattcagaaaaagatcataaaatagattttgagaaaaagagatcacacaaataaggagaacatgggagagagcaaggagaaggggaggacgctttggatgaattggccagcctctcttcagtgtgggatcagcatattttattcttctccagggcctagcactgtctctgtagggcaggtgtcaggacagtgactgtcacagaccactctgcctctatctttgaaaagtcagggtttctagaacatcaaagaaaacaagcccagctcaattactgcagaagaaaaagtccagaggtaaagaactgtccctgccaatggctgatgagggttcttgtaaaaccagctaaagcaattgagaacaaaacatttcctaagtgaaatgcattgtcattatgagtcgggatgctcgcataattaggtagtgatgcttctgctgacatttaactataagaaggagaaatgttgttgagctagaaatggcagtaggtaaaagtttttggttttatttttgtttttaaactctaactttgataggtattttcttgatagaactgccctttcttaggaggacatgtttgatttatttgaccctgtttataagtgtgtttggttctgtcatcactctcaagccagaaaagcaggaaaaaatgttaaaactctgtacagaggtcacaaggacctttaaggccgcaacttgaaaccacaggcttgcacaataagatatttgacgttgttcttgtggaataaatatataagtaacatgggtttgaaatgaaatctaagaggcacaattgtcaatgtgcaccttctcatccgacatccttattaacgtgactgatgttcgaagaattccatagactccaataatactcatttcttctctttcactgggctcttttctaagcagttttgattttctaaatcttgtttgctaacaacagaattaatgtgtgctttaaaaacaaaatgagaagagctggttagacagttcagcgggtaaagccagcttgagagctcagatcaaatgcagagctcacacaaaagctggacatggcagcatgtatctataatcccaggctgcttatatctagtggaaagaaagaaacaggaaccctcagaggtttcaccttagtcagactgacctatgaatgtgatctgtgtgtgtgtgtgtgtgtgtctgtctgtctgtctgtctctgtgtgtatgtgtctctctgtctctcatctctctctctctctctctctctctctctctctctcacacacacacacacacacacacacacacacacacacgagagagagagagagaccatccctccaatcttagcttccactgtattcctgccccctccagccatgcttgacttcccagaatgcatccagtatatgtccatctcaaagtccatacacttcccattctctccttaccaccctatcacatctatttaggttaattcttcccatagctcttaccacctttgggcatgcagcttactagtggttttgcttcggttaatctgcccttgctagaatttaagtacagctgattccttcttaggattattcaccaacacatacccagcaccttagatgacatttggcacatcattaatgcctaattcaatatccattgaataaatgcaaggctttttaaccttctctaatagaatgcattcctagaggtctggtcccaggaatctgtggactcttgacccagttaaggtcaactcttatctggggaagctttatttcctctcatcaataagagcaggcactgtgtctaaaggtggtatctctagttaaataagattcttagtccttgaaaatcacatcaaatgtctgaaccacagcaaacagagttactggggattccaaagatgagcagagacttgtatggagatgtggatgctgacccacttgaaatttgggagcccctcccttgagctcagccttgcattctcctagcagctctgtgggccagtctcagtgagctttcaatacccagtatacagagacagtagctacatgctcatcaccactaggactgatgactaacagcaaggtctaggcagtgccagaaagagccaggtgtggccttggccaagggggagacccactatttcctgaaacaggaccatagagtttggatctactcaagctctctcaatggaattgattcctggtttctgattcttgtcattgaataacttttcaatctttttatttttacttaaaaaaaaaaaggctagggaggaggaagaacatcttagaatcaggtgtcatggttagtcaaaggccaacctaactgactctccttttgtatctgggccaaaaacagacacaagtagccaactttgagtctccaactgtattatcagctttgcagtcagacaaactttggttcaaatcctggctttgtcagtctctagctgagtggttgtcatcaaagcctaaattccaggattcatcactgtaaaatgagaatcacatgtggtaattatacggcttacttgatgccttttatgttaagtttctggcacatagtagtttataatgactgtcagcttccccgaatcatacaagacctggaccctctttatggatgctggggcaatgcatcatgggtcttcttgatggttgtctctatgttgtcatgggaagaagttggggagctaacaatggaactaaggttctttgcctcactttctttcctaagtgtgagcacataagtagatatgagagagaaggagaaacacaggctactatacacagactggacacaaaagtgtgttatgaaaggtaacatgcttttccctgcctggcctgagaattaataccagttgctatcctgggtgtgttattttaggtttggcataaacacttgagaaaaccaggacaatgttcatagtaactttcttggggcttaagttttaaatgtcataaggggaaatggagatggcttcacctataaatgttttgctacgcaaacatgaagacctgcacttagtcccaaagaactcactttacaaaactgggtggcatcagcacatgctggggaggtggagagaggaggatacctgaggcttgctggccagccagtctagccaaatccaaaccagtgaattctgggctcagtgggagaccttgtcatgtagagagtgattgagaaggacacctgatgttggcctctggcctccacacatgcatacatactcacacacatgtacacatgttcttaaaaatatggctaggcatttaaaaacctttcagacatgccattcagcatttcccaaatcttccatttttaaaagcagatgctcggcattgcacagacagctatttcctgtccactataacacaaaacattccttctagattcttaagaatataatccctgttgaaatggtggctttgtggtttaagacatgaattctaattatttctattttattattattattttgattcgtttttcaagacagggtttctctgtgtagccttggctctcctagaacttgttttgtagaccaagctgtccttgaactcaagagatccacctacctctgccttctgagtgcttgagttaaaggcatgtgccaccagtgccctgatctaatcatttctaaactctgtactctggtctactcttagaactcaacagaaatgatgaacagtgatggagtgtatacaagacctcctggatgaagaatgggcaaaagtcttctggttctacagtacagtgataattaaaactaaggcaagatttggtctgtgccaggaactgtcccaagtactttgcattcttaattcgtttaagcctcacaattttttttgaggaagatactattattgccacatgtcaaaacacattgaagggcagggaaaatcatgcattgagaaggtagatatcacacagtctccctagagtgccgtatacacgaggaatagtgaatttgattatattcaaaagaggaaattgagcttggggaggccagacattttcccacagcattagctacaaagacagaaaaaagacctgacttagatgacatcatctatccaaagcctgggcccattaaatgttcactttgtgactatttatttcaatgttcagacaagccagcagagtaagtcatccccacatctcaccagatgccccttctacacagaatctgaggaaatagtagaagcactcttttctaaacagcattttctagagtagtcctgaccagtgcacaaattattttctaaactggacttggtcagtggctgcctaatttatttaatcctgatttaaagtttaatgtcctgagccaattacatattgtaccatatatgtaatatatatatatatatacaggtggaggccagaggataagccagagtgtcattccttgagtactagtcatcttttagtgtcacagtttctcacgggaattctaactcaggctctttggtttctgagcactgtaccagtgagctttctctttagcctgctacgattatggtgtacatgctgccacacaaatgaactccttggtgtgaacccagctccatattaaaccatgtaaatttagaaaaacaatcaaagccttggaagccttttgtgaaagataagaaatgtgggggaggggattgagacagcatttagctgtggaacttggagacagttatttattggagttaagagtcattctaataacatgaattcaaaacaaatacactttgaaagagaatcctaagtagagagaaactaagatgttttccaagtgttctttatctgttggtttttcttgattgaatggctatttgaaaaactatgaggctctaaaaagccataggctttgaaaaggcactgggcccaaaggcacatgggtaaatcttcatgagtaaacgggaatggtagtctgtatcacagggcataatgggaccactgtgtcaattctgtggtgtggagctcactaagttgccagcatcttgactgacacatagccagtaggaggtccatgtgcttactattacagtaactgttcattcacttgctggaaaaaatatatccaagcatccaagcttcaagcggttggattgaagcttcaagcggccttgtagatacatgcattaaaagcagaaagccctgacttctcagaacttacacctgatcagagaaagcagacagtaaacaaacagtaaaacatgaagggtgggttgtgagatgggaatattggaaaggaaggagtgcatagccccgaggaccaagagaggagtccctaaagactgggagcactgagaagtgccagtgacagacaggagtggagatgagtggatggctctcctaaaccagaaaacagcatggaccaggcccagcgggagggacagagagagggctcagattcgaagcagcttttggggacagggacttcgtttgaagactgtttggtttttttccccctaagtttactgggaagttgctgaaaggtgttctgttggcatggggctgggttggaggaggcagcaaaatcacgtttggcttccatgcaatatggatgagtaacacatcatccttagcattgaggtagtagccatcttgagtaatagaagataaaggtttgaagggaaagggtcaccaaggcaaacacatgagtaaagaaaactacaaagaaaaatgcccttaggtacaaagtcatgggtgagaatactgcaaaggaagcaagcctacccagctcatatagcactgaaacttagcttagttatgagcatggcacagatgaagagcagcactcctggagactataagtagaactggccagcatacatataaaagactgcgaacttaacagtaactagatgctgcatttcccttcctcctgtcactgtccatttcagaattcctttgagagaaatctctgccaccctatcacagccccaaaaatccatgttctgcacgtttcaaatgatttccatgtgctgttccgttctgcgttcttgcgaggtcatttccactggctgcgtttgagagcatgcagagcacacatgcatagccccctccaactgtgaactttttacctaagcttccctgctgtctctgcatgcttatggaaaagctaaagcagcacaggaagtactacctcatctcaatggcattagcagttaaaatcgcctagtgtctggacaatatgccactgagctacctataaagtccacatcaccgtgtggcacatctctgttccttggagtcattgtgtgtggtgcaagcctgccctgctccaacccctcctaagcttttgctcagtttatccttcttattaaatttatgatgggaaagactatcaaggctgaaaaacttcccccaaaatttgattatttagtcatcttattccttttgaataagaagtttgctggtaaacaatgctgaaagtggaacttctctgttacgagtgatggtttcctattttcttggtccttgctgaggttgaacacctggtttaccttattgggaacatggcaagtttttagtaattgagaaccatgctggttaaagacagccctgctctttgggcacgtcctggctctgctgcttccaggtaacactgctgccactaggagcgactagactggttagtcaaacagaaagtgcctgtctgcctcagcatgctctgcttccctgaacagaagagcagacaggctgagagtgaagatatttctcactgaagattccagaaaaatgaaggtgatctggacctctccttctttgtgttacatttattaattaggaagaatttgagatgttttaacagaaaaaaaaattaaagggagaaaaggaaaaggaaaccaaaagaaatgcaggaaaaaaattagaagaaggtctgttttgttagaaatggaatttttttgtcagaaaaaattttcttcttgaaatcctggatttaggtttggttgtcttccacctgggaagcaagtggcttcctgtgtaggaccttgccccatctgtgccctaacttcctgatgctctgactactgcaccccagtctagcataccctcctccaggttttccatgtgaaggatccctctagcagggaactatgttaatagcattatatttcttctctgcagacattttcagaaatgggagccttcatggcacagcttgcctgccccatgttcagatgcagaagggaccctctattcttcatccagccattgaaatctcatgtctctcttttcagaaaaccaaagtagaggaggaacagccaaagcagactcttgcactcaatgataataatgattaacaggcatcactgtgtgttttaaacacactagtgatgaggggtccatttatgggtgttttcttgagaactgagcatgaattcttaaagaattttttcagatcaaatgcttcatgttctagagccatcagaaatgcacagggccctgctgcctctccacctcagtttctctcatccacatagcagtgttggtttcagtggtggggtaacctgggaatcaggagaaccactcttagggtccaactccattggaccacaaattcattagacttgtgttctcccactgtgtcccactgacacatgccctcatgtgtcagtaactccagtgctggaggcaggggagatgggacaatcagtggagttgtttggctacaagtttggatgagaaaccctgagctccaggctgagtggagaagctctcttaagggaataaggagtgaacatggaggagggcactttacatcttctcctagccttttacatatgcttgtacgcatgcacatatacataaagttaatttaatttaaaaaaacaatatctgtttttcaataaacacagcattgtttgctgagctacagcttgtcaatgttgatcaaagccacaagataaccacccaataaaggaaaacttagccccgactttaagggttttatcaacaaagagccctaattatctcctgaggagtactttggtgccctggctttctcagaggcctctgccctaatgacagtctccgttgacactcagtagaaaacctcagtaccaggcccttctcacctcccattttattttctttaggtctttgttttgcctttaggttggagcactttgcaccaacattgtttctatctctggctctctggctctctttatctcttctctctttccttcccttattttcttacctcctccccccaataaactttctgcattaaaaaaaatagtgtttccagttaaaaaatcataaaatgattgtgtaggtgattttgtcctggacaataatgtaaaccatacaaatttctttcaaaactcaggacatatcatctaaaaggctcagattttctgatacagatataggaaccaaaatctgtaaacagaggcagtcacgttaaataatggaaactagttttcaagtcatcggaatcccacttggtacagcaacagcattgctggctctttggcctgtaaactttactcgctttttccaaaaaatttaatggcttgttttgtctacatagaaccatgccaggaaatttagtcatgcattgacttggttattgcatgtataaaagtgtcattgttgtggtgggatcatttacaaaactattataaacttcagcacatagacttcttacctggcatcagcaccccagctcatggcttccacctgtacaatgccccaggaagccctggttcagctgcccctctaatctgtgtcatgctatgtgtgaaatgcttccccaccctcctgggttagccccacccatcagggtcatccatcatcctctcccacagtggggctagatgttagactcctctaccgccttccagcaaattcctgtgttagtgtgtaagacactggcctcacttgtgggttgtcttgtctctgccatagacatttccctgcgatgtacaggttcagggatcactctctattaatggggtagttgtgagagtgataggacctttcatggcccagttatatatgacccaaggatctaagataatggatactttgtcatcaactcccaacctgagacagtggctctgagtctgcttttttgcactactggcaagtaaagatgtagaaagggctgtgttaaggatcactccaggaaatcctgcatgggacaggagagagagagggaagcttttgaattccctttgtgtgtgggtttacaggacaacagcagacactggacaaaggttggggtcatctttacaactggtttattctcgagactgcacagggctgcaccaaggaggcctgcaggctctacacatgcccctagtccagctaggggggtgatcctgtgctgtgcacccaaatgtgctgtgtcacccattaggttggctggagcctactttgcccatctctgacttgtgctttggttactactgacctccgttatacactagcctttaaatactgtgtagttttgctttctccaggcttgcaggtttctcatgtgtcattaattatatgaaattctctgtcctcacagctgccatgaagtggtggctgccatctaggtctctttcctgaaatgaggcagactcattagaaaccatccttacttagttacaacatctattacagtaagtgtatggcaagcaatgtattaaggataagaatatgtaacaagcaatagtgcccagcacatctcctatggggaggtcttatgggagccaccatgccaccactggccttgctcctttgagtctgtctgtctcttaccaggtctgcttaagtctctcatcatcactggcatgtgtgtctgtctctcatcctcagtgctcctggcatcaccgtgttgccctaacatccattcttgctgtggtatgagagggaaacttgtggttttcattttaggccctttgcccttgcttctcatatgagctgaccctactgtgagctgactcctgcctcactatcaatggttacatcctcagtgatcagaaatgcccctccttccgctgactcttgacaaacgttattaggtcacaggaaagtgagtagaattacctatttcgttgtttgtttcataacctgggtctgttggtgctttctctgacattaccattcactgtagggataatggagacagatctcgaaaaaagatctgaaccacgatgaaaaaatgagaaggaatgaattaaaatctagactcacctttcctcttagccttgtttatctccttagctatggtcatgcagccttcatcacagaacctagtaccattatcacgaacgtgtttagaatgagtaagaaattcacccatctatttcagtcacagctatacaaaatgttacctttgacagttataggacatcctgaagggacaagagaaaatggctctttagatgggaccccagaaatgattctgccaaagtctagagtggtgaacctgtgagcttgctaatgttacaggagcttgggagccctgtaacattagcatcaccaaaagcccactgcagcacatggcagttcacaaacaagaggctgccgcagcatggaaagcagctcataaacaagggcccactgcagcatgggcggcagctcacatagctgcatctccacagctcccagctcagttcaacaggaaagtcttcccttttgccattgtttgtggcttatataaccttgggcaggaccttgtggatcgtgtgacttttctagttagcttcctgggtctcaggtctctccttcttccttccagaagggagtttccatttacaggaaatagccacacagcaggcatgcagagtgggtaaaagtcagagccctgtctcccttgttactgactcacttgaagtgaaccatctaaatgtcccttgcctcagggcctcctttaacatgagctagtgcttctctgagtgttctagagaatgtgtgaaaccctgttatgtgaagggtgggacaggcgttggcagagggcagcactgtaatcatcggagcagaaactgccacactgtaactccaaagattggcagacaaattctagcggatagccatgaacagaactgggttccctttaacaggacgtccctcagaggcagtctgtgactcttgttaaaagttgtccagacacagcttcccttctctttgctttctctctgggttaggatggaaggcactcagttgaggctgatgggagttcaagccaagcttgctcacatccttgttcagcctattcagaagtcgtcagaagaaattacagaatttccaaccccaaatccacctcctaaagccctggaaactttacctatacccttccatgaaaatgcactagctctgacacacattcctgatagcttctaatgagtttcccagtgcagctcctcagtctgctagtgagacaaactgggaaaagtttgctgagaaaggaaggccacactcgaaagtgttaactgcctgacattagaaagcagaccctgcagaaccagatgctggaccatgcctctgtctaggcagtcacagatgtgtgtgatggctcatgcagggacaggttaaaaggaaatggagctaaaaattggcttagtggcctgggtatgtgtgacttcaggcgactttaaggggacttcagctcataggctttggcttccctaacagttagcatccagctgctgcccaaggaggaagttgccggtgcacttagaagataaggatgttagactctcggaaaactcaggtatccagggtcccaggccatgacctcggtcaccccaatcaccaggtgaatttgagagcttgctgaaaactgcatgaggctttattgtaatttaacgagctaaacccatgttagctcgggtctttcacctacccgccatggctcctagggcctcccaagagatcttataaggcagtgtaaggggagtgtctaggggtacgcacaggctcactattggtttgcctccagccttggagggcttgccctgtgttgattggtcaactggttgttatggcccataggccctcccagggtggttgctatgctttgtgcatcattgctgtgcgcttgtacgtaaagcacacccagggtcgtaaagcatagcgccaccagctaacttctgattggttccttnnnnnnnnnnnnnnnnnnnnnnnnnnnnnnnnnnnnnnnnnnnnnnnnnnnnnnnnnnnnnnnnnnnnnnnnnnnnnnnnnnnnnnnnnnnnnnnnnnnnnnnnnnnnnnnnnnnnnnnnnnnnnnnnnnnnnnnnnnnnnnnnnnaaaagggaagctggtcccttcaaggaaagtggcacatgcagtgatcaggggaagccattcaaaaatactggctaagagcaattctaatgctggagtactgtgtcaaagattgttcaggagcactgatagtgctagcttcttaaggagcaagggcatttagttccatttgcaacatctagatgcaggtcccacattcccgagtcattggctttaggtggagacttggataatgtttagatgaaagagtgagtgaacagcaaaatgaatatgaactcatggtaacaagatcattttgactcagattcccagaaggaatctaatggacttgagagaagcaaacaggagagaggtcctgaattaggcaggatgtcacccctatagtctaaacttgtaagagaaaaaactcattaaattcatttgtaagatgaaggctgtaagtcagttggcagatcacctgcctgcctggcaggcaccaaccagcactgcaagcaggagcttagcctgcagtcacagcacttgggacatggagacaggaggatcagaagttcaggtcatatttagtgacatatagagtttgaggccaggctaggaaacagaaatattcaggacagtagacagatgctgagaccagggtaatcatgggcacacatctgaatcgggcatgtaaactataaaagaaataagaaataagttctaacctaacagaaccctgccacctgggtgatcgctgtcaatcttgcatcaataagattcttttttctcatgtgtaaactgaaggggtgactcgatttgttctggaatgtccctcccaattccaaccgaatatggtgttgaagaaaagaagcccatttctctgatgtatctggcacacaatggaactttaaaggtgtagacctatacaccaaatggcacagttcatctcaaggacactgtgctgggggtgggcatggctctttaagatcactgcagcaggcaaaccgacttgtccataatttctctctctctctctctctctctctctctctctctctctctttctttttttttgtgcctcccacgtgtaggatttggcatattgtaaatggtagcctacacatgggtaaatgagaactgggaagataactaaatcccaggtgggaataaagtatacttgtaaatgaacaaaggaaatgtgtttctcctgaagccaagatgctaaagatacactttatggttctgtatacactcagcctttggtattcggctgcttcagatgttctaggtcccacttctgaggaatccagtatgtgtttcagctgtgattgaggcaggagacatcattcggttcaaaatttcaatcttagaaaagcccatgaacttgatacataaaaaaacaaaaacaatcaaactgcatcttattttcaagctaacatttaggacaaagcagatttcatctctgggtctttggcttccacgccaaagcccctattttcctctcagaagacagccataaaaacttagagacgcaaagggttccaagatgccttatgcggagtgccttcccaacggttccattttggcaaaccggcaccagaccccactccgccaagctcccatacccctatgtgagtgtgaagagagtatctggtcacaaatgatgtgggaaacaaagcagtcttttgcttccaccttcttgtgtgaccaggatggaacccgatgttcagagacataaagcaagtcacagaagggcacacagcaagccgcaaaggctcagtttctaaggcctctctcccctcaaagtccattgatctcttacaatgcaaaacaaggatagctgagcattcacaaaaaagctacaatgcagttcctttttcctgttttcacttggaggcttttgtcttgtcagcatcttccagggaggtgacttactgcatggagatttcacttggcattgtctttagcagaagcgatcttttcaccatagccagcgtttcctttggaggttgactccaattcacagaacacgtcctgacaatcgatgtttactaagttggctgtttaaatcatgttcagtccttggtgacatggactgttcctttgtctctgcctctgcctcgctcgcctttttctttgtgcttgacacaaaaggatggggccctggctcatctggatatggatcagtgtgttcccgggtaagccttgcaaagctacggagcaaaggtgttgttaaacgttagaagtcattcaatcacattccacatccgtgtgtctgcaaagtgagaaggaaagcactctgtgaacatctgtcatggggctgtgcccttgctcctttttaaagatgttgtattattccttctttgctggtttctcctttatggaatgtttgagattagtacacgcaccccaccctgccactaattctgggctcttatttcatactgaagtatcataacaaagtggtggtggttgttgtttgcaggagcccgtcaggatttattctgattatatttccctttcgaatcaccgacgggcatccacaggcattaccagataatacttactatgcagtagctatattttctaccctcacttttccagaagcccttttaggcagtgagtgtagaagtcagtgaagaggcttctgtgtgtctattctctgcttgccctaacatgtaaatggaatatttgagttttggagcagacgccatctgctggaagtttaagatactgcaacccagatttatagatccagaaaaaaactactagtctgatagctaatttaagtaaatactacttccatgacctcagatagattacaagctttctaacttactgtttggagtgtcaatatttgaagtgtattttttgtgattagaaaatagcttttcttttttatttgtgctcagcgttagatccctggactcttcatttagtttgcaggcacaagaacacaggttagattactgctcctcttgccagaaagaatagctttgcaaagatgcactcaggggcctataaaaatgaatcttgtggccatataagagaaaatgaagagaaagaagaagaggggaatagaattatgtgggcatgaaggacaatcataaaattgaaatcacatataaaactaaatacaagataaacagatccttctttctaggagggcctcgttctgagaaatctgcttaacaccccatactctctacactgccccctcactagagaggcagtaaagaacatccttcctagacctggcttagaattttctactgtagtcatattgggtagaacacctgttaagcctcaacccaaccttgggttttccctaggtggctgaataaatcatttcatattttgagactctatttccccacttgttggcataggatgaatgttcctgtctgaatatagctacagaaaatggaagaaacagagccagggagatggcttaggtagtaaggcccttgctgtgccagcatgatgacctgagcttgacccctgagcccacagaaaccctaggcatgctagtatactctcacaaccccagtgctggagaggcagaggcagaggcagatggatctctagagcttactggccagccagtctcaccaagtcaggaaactccagattcggggcatgaagacatcacaaacaaacccaaaacaacaacaacagcaaaataccaaagtgaatagtggagaaagatatccaggttgacttttgacatgtgagcgtatgcacacacgtgcacaaacacacacacacacacacacacacacacacacacaccagtggcacataacaaacaagttttaaatgatacactaattagcagcctctctctagacagtactgctttgacccctctaaaacacacttagaactaggtttgatctgaaccgtatttccccatgtacagaagaataccctaaaaaatgaaaacaagaactacagccttcatctggctatgaagtcctgtgggggagggtggactcgacccaggggaagtgttgagagacttatgtgttgcttctcttccacatatatgcctaagaaggcaaagagctgacaaaataccaaatagaagcagaaagacaggacagatgtccccaagcacactgactggatgtccatgtgacttcctggtatgtcagtgtctcacatccaccatggctaacaaggatgctccctttatttcccgttcccttataaatggaacctcctgggtgaggtagtagaagcataactacatgggaaaatttgatagggcttttttctcctagttcatcccctgtcatgttggccattgctccaccccactgacaccctctgtttccaaacacccacacacacatattgcccagccctaaaggacacactgttggtgattatttataataagtctctctgctcttggcaggatacacaacagctgctggtctattctttgccacaaagaccaacttccttctgccccgggtgatgggaagacagtcatgcagagcaatttataactgtgtcccagaacctcgaatttgtttgtgtttatttatattgcttccatttctgatggggaattctgagatattcagcattcccctgtgggagaattctccttggagaagcctctggtagccttcaatggtcgtcttcattgagttagacattttaggactctaggctaaaggaagtagtgaccagtccttttatgagagttttagaatccacattctgtgttttgttaaaagggtgaatgtgttctgtgtcacttgaacaataaattactttgagttgctaaagggaagatggcttgtcttcatgagttccctacgctcacaacttaacaaaggatctgctcagtcgggactcgttggctagcctgggtagacggctgtgtagagctctgtctgcttggctgtcaggagccaccttgtatcacactcagctttaggccttgtcctaggtaaagcagagaaggaagccaatgttctaccatcccatcagatctagtaaggagagtcaaaacagggctaaagcttcagaaagaccacaacagcatggatgtcatgatcagagacccaagcagccctggaagtcagtgtggtcagcatctttcggttcttttaagggatggaagacacagagtacaggatatgcacctaagactgaacactcaacaaagatccaaatggctctcacctcactatcaatgcggtagtatgtaaaacagcctccgattaggctggccacaagtcagaaccatggtcaggaaaaactggaaaaaggtagaatgcggcagttagctatacctgaggttctagagtatggcaaagaggaggtccactcctgaccaccttgctttcttctgtatgagcatagcttgttacatatgaattgtggggaatttcatgtgtaagaacaagctctggtcagctgaccatccccatgatgtctgtgcctcttgggggattcgaaggcatggaaagcttcctggtgtgtgcctgcttagtgtgccctgagtgtcccaatgatcccagccctgttcctctgtgatgtctttatccttctcagcaggggcttagcagaggctcctggcagacagataaacattacccagaaaaatccttagtaaatgaaggcactgaaaagtctcctggtagttttcggagaacttgctgctcttgatttttggtataggacgtgatggttactttgctaaccggacacataggaggcatgcctctatgagaaatgtttacattaagcctctgagagtagccccgaggaattgtcttgaccaaattgactgatgtagaaagacccatcttacttgtggtggaaccatttgctgggcagaaaattctggattgtagaagagtggaaaaagatgggtgagcaattacccttgttctttgttcttggtgtatatgtaatgtgactagctgcttcaagttcctgatgctttaaccatgatggtccatatcaagaaatattagtcaaattaaccttttgtcttagttaaggtttctatttctgtgaagagataccatgaccatagcaacttttataaagaaaacatttacagggtagcttacattttcagagattcagtccactttcatcatggtgggacatggcagcatgatggcagatagggtgctggaagagctgagagttttacatcttgatttgcaggcaacaggaagtggtctgagcccctggatagggcttgaacatacataagacatcaaagcttgcctccaataaggccgtatatactccaacaaagccacacctcctaatagtgccactccctaggagcatatggggccaattacatttaaaccaccacaccctttctaccttgagctacttttgttggagtattttatctcagcaacaagaatgaagtgaaagacatttaacctagggtctcaagcacactggaaaaacactctactcctgagctacattccaagaaacgtgtgtgtgtgtgtgtgtgtgtgtgtgtgtaaaatcaatatgttaagaaagaaaaactgtatacttactgtttgtagtgtgcttaggacataataagtaaggttgtggtcacttcacatatactgcatgaatatacaatacctgcctggtgagcttagcctctcagtgctagaaacagatgctatggacttaggcagagtagctgtgattttatattgagagtggaaggggcaggactgatacacagactacgtaatactaccacgttcctacctttcagtgcctccctggttcccctgatgctcctgcgtgactgtttgttaaaacactataatgtagaaaataagaatgagttggcaggaataccttctcagaaacttcccttagcatgagcctatactaagggcacagaacattgaaactgcaggtcaggatatgagatactaggtttaggtaactcactgaaagagttactttgaggcagtttgcctgtatctcatcttcagcgactaatatgcagacagtaagactttacagaattcttgaaaagataaggtacataagcttcataatacaatattctgtaattaataaatattatctactatcgttagtaacattcagtctgcctgttttccttccaaggactagacgagaaagggaaccttgaattgtttctctctaatattttatgattcttagcatattataggttctaaataaatgttgcacagatggatggatgggtgggtgtgggggtgaatggataaatggatgtatggatggatagatgtatagatggattcacggatagattggtgaatggatacatggatgaacaggtaaatgtattgatccctggatacatagatgaatggatgaatgaactttaatttagtagattaagcactacagaaatttcaatatttaagaaccttcccaaggaatactgcttcacatgttacatgatggaaatcataagacactgcacccatctgcagaatccatcaagggagttcattgggctcaagtagatgtttatattcacaagactattgcgctccacctttgacaccagccttctcacaatggtaagcatagaaactctagagtccaagtcagaaacatcagatgcctatctgtagttagaatcctgaaagttcttaggcctgatggtaaggtgattattgggcaggtgaagaacctgactttgtttaagaaagttatatctcacagtcaaaattcttgtaagatccaaatgtatgccttgcagagtcctttctacatgctagttagagacttgctaaacacagggaagttcaaagcatagtgtccctattaggacttaccattcatctatagttcccctcatccagatgtattccaccaatggggtcaattttaccacattcaatgttgcctagtaacacaattgacacatatcatctttatctgtttctggaacaactaaactaagaagttaaccaacagaaagatgttttgttaactctttgtccatcatgtttagaattattcaaagctgttatttataacagcctgagaaaaccatcaaaagcccttgggaagaactcaccctccatattttacctaccacaaatatgtccacaggtggcacaggcacagttgtgtttgccagtttgtccccttcccctgtcaacccagaggggagctcagtgctgcttaataccatgcctgcccttcctcttgtcaacagccccatccttaaagaccaagagtagctgatgctctagcagagtgcttctcaaccttcctaatgctgcaaccctttaatacagttcctcatgttgtggtgacctccaaccataaaattatttgttgctacttcataactgtaactttgctactgttatgaataataatgtgaatatctggtatgcaggggttgcagcccacagtctaggaactgctctggcacatatcctcatgtgtaaaaacacagggggtttctgtttcactggtcctatttgattgaacagaggagctcagccctgagcctcactactaaaggtctttttagtccttccctttcttacatgctgttggggtatgaaatgagatcaaaatagtagaaagttgaaaggatcccagtaaaagatctaagatggatttaactgttctgctagagtgtaagtgaatgccaaatgctgttggctgggagccaactgacttgtgaaaagcttgaggaagtcctcgcttgcattttattagccatcaagtatctttgtaagtggttaaagagggttttctattgttgcttgtgtttcaaaatgagaaacacaaatggtctggtagtctaaacatccatgaggtgatagatatgtgtattattgtattatttcccagcatgcagtgttttgcttggttctcttcactaaccatcaagtattatcaatattttgctttgagacagtttcactctgtaatgcaggctagcctcaaattcacaacaatcctcctgcctcagcctcacaaatgctaggattgcaggtatggcccatcaagaagaattaactctactcctcagtaggaatcaaagctcacagaagctacaagtcctatctggcttcaccgggaaaagccttaagtaagtcagtgaagtgttagtccaaaaccagtgttcttgttccagcgtaccctgtggagagatagtttatgatcannnnnnnnnnnnnnnnnnnnnnnnnnnnnnnnnnnnnnnnnnnnnnnnnnnnnnnnnnnnnnnnnnnnnnnnnnnnnnnnnnnnnnnnnnnnnnnnnnnnnnnnnnnnnnnnnnnnnnnnnnnnnnnnnnnnnnnnnnnnnnnnnnnnnnnnnnnnnnnnnnnnnnnnnnnnnnnnnnnnnnnnnnnnnnnnnnnnnnnnnnnnnnnnnnnnnnnnnnnnnnnnnnnnnnnnnnnnnnnnnnnnnnnnnnnnnnnnnnnnnnnnnnnnnnnnnnnnnnnnnnnnnnnnnnnnnnnnnnnnnnnnnnnnnnnnnnntgccatctctaaacacagtagtttccccattagctttaaaaagtatgttcacttccttttgttgaaagaaagagagacagaaagaaaggagggagggagggagggaaagaaggaggaagggaggaaaggaaggaaggaagacaaccttactgaaacaaaattgctaagtttagatgaaaatatacacgagacaaagaaatttcatttgaaatttctctgctccatttttattaccttttctgaaatggaatttataatatgaatgaacctctcccccaaaagattctaaaatatgaagaaaattaaaacaaaacaaaacaaacaaaccaaaaaaaaccccaacaaatagagcctatagtggaggttctggagtcaccattctgcatcctgccttgccatagtcctttttaaaggaactagtaactacaactcattacccatctgaaagacacgctgaatagtacacagacaggttccaaatcagtagaaagcatttaagatcttagacacatcgctggttcattgtagcggaaagtctaatagcctttccaaaaatttcagctatatgtttggtctacttacagcgtgcttgaacacatattcctgccaagatgaaaaaagtgaaactaaatccttccaccatggctagcacgttcccacttctttctgattaattcagatgtctgtgccatgagagcattcaaaactctcaagcagagctctaagttaggaagtatatttgtcaagtaaatgctaaaacttgcatgaagggcatagagaattagtaatggtacgtttaggacataaaaatgtgtgttttcttatagtccacctcgatgtaggacaaggtaaaaagaaagcaaactccagttctgtcagataaaaataactgtttctttaggaagcttgaagaaatccactctatcatgcaattattctatgaaagtgaaggtaatgaaattttaattaacttcatttccttcagcttctcttatgttctctcagaaaatagccacatgaataaagtgacctacatgtgcaaaaatatatttaaaataatttagctgcctgaattaaactaaagtgcaaaggattggctttctcagaaagatgagatggatttcatcagaacagcaccgtcctaatcagctgtttgttttcaaacatcagtgtttcatttatgcatttactttgctttctttgatggtatgattttatagcatgcttttttccctatacattcttatttctcaatcaagatttcattgttttccattaacttgtagaaattaatctgacttacccattgaataaggtgaaataatattaataagtgtatatataacttagtaatcttttaaacgtgggataccagcccagtgagttgactcagtgggtaaaagtgcttgctgctaagcctgatgacctgagttcagtccccagaatggaataagagaaccaactcctgtaagctgacctctgacctctacatgcgcatgacggcacatataggcctgcatgtgagcacttgcacattcactgtcatgcatactcaaacatacacacacacacacacacacacacacacacacacacacacaataaagtccttgtttagtgggactcctttttgtaatgacaattgtccagaatcctggagtgctgagggtgtcacagataggatgtggagttggagatcttacggaagaggtcagaaactctgaaagatctcagattttcaaatcatgtatccactatgtcaacatttcctgcaacaggcatgaaagactccagtcattcctctcgtaccacattactgcttgatttaacaaatcacttgtcggtacttgatggagacatctccaggataaagaaaaagagcaagccaatagcattgagtgagcttctgtcggcgtgctcctcgatagtgaatccccaaagcatccctgtaaagccagtgtagttatcttctctgtaaaataggaaacggggttctgagatggagatgagtgaatggtccaggggttcctgtccaggcagcagagcaggaatctgagataaaactgattagtcttggaaatgggaggggagttggttaagtagcaagagtgaataggggcatttggggaggagagcattgatttaattttcatccaacagctattgtatttgatgagatatttcatgccagccctgtgccaggcaccaggggaagtaggagtaaataacagttaacaagttaacagttaacagttaacactgtgctacatgggagcttggctttctgtctgttgggatcctctacaagggtcttcatatttccattgtatgatcctgccatagcctaagctctttatcaagtataacctagtaacttcattgtttgatgaaagtgaggggctagatatttagagagaacagtagggtaggctccaaaatggagttcctttagccttcctggcttaaggggaaggtggagggtgtggggtggggggaatggacaggatgcagcaaaacaggtgttgcggttgataagtgtcccattttccactaaattttcccctaaacagattctctcatttaggagatattttgcaactgattttgggagacagacagcatgaggaggtgtaggtagaggaaggaaagggaaggaaggagcctgtcttggttgacctgtgtttagagccacttttgatctccccagggactccccaccaccaccaccacacacaccctcttgtaaacagtgacagtttgcttatgctgatttggaggatgagactgatctttgtattaaagatgtctccagtcacttagagaggtcaggccactttgcagggctgagtccttgggccttaaataaaagggaggttgcaaaatccaaggtgaaaagaaaaacattattctggcataagcagtacaccattcatagttttgcaactagactatttcgctgacaaagaaaaatgtatttttaagcctgagttctaaaaacaaaacaaacttccatccctgccctgtagctggcctgtttctgccagctcctcactctgaacacaaacgcattcttgcacttcccagtgctcaaccagctttcagcaaggctgaggccagcgctccttctgggctccacctcactcgcctgtgctgggggaggggctctcttgcctgctgcctgtccttcccctctcccatctggctccctgcctgttgccctcatcaagctgtgctacctgccaccaggcaggaggaccaaggagaatgaaaggattctattcttaaatctggaaagctagggcaaataaaaaacaccagcagaaatggaaaaacagaagtgggaaaagctgatgcaggaaactctagatcgcttcccgaagctccattgagtcaccagtttctgtcttgacttatcttctagcctgaagaagggttactcagtgggcaaggaccttcagttatatgggatatggggaagaggaggtccttttggtgaacactactagttctgtgacccaggacattacataggaattcaaatcattttgttgcatcccaaaagatgtttcccatatgtcgcttttttccccttattttcctttagtgtggtagctttcatgtttgtgttactttccaaagtaattaaaaaggtaaattcccttagtatatctacacaggactggcttgtttatcccaaaggaatgaagggtataacttgatgggtatctcctttcaaaactggtcattaatgacaagaaagagatgttgaaagtgtaaagtcctcaatctttgatggcatgagagaaaaatctttttttttggggggggggttgagacaggatttctctgtgtagctttggagcctatcctggcactctctctggagaccaggctggcctcgaactcacagagatccgcctgcctcagcctcccaagtgctgggattaaaggcgtggcaagagaagaatcttagaaccctgagcgtgggagggaccagatgaagaagcagaggctgcatgacagcccccaagtcacaaggtgagaaaatgccaggtctgggtgcccacttctgttctcttcccactgtgcatgcatcctgtaattcccatgtacatctttttgtgccaacattgtagataaagctctgcagaatctaaccaagttctgtgacttaacggtcattcacctagaagatctccacacagaggtttctctaagcaagccagaaagaggttttgcgtcctacacagacatactgtctagtctgtgtcctccagcctggccatgagggttgcctgctgaagagcaggctggatatagctcaactctgaccagtcccctgggtcagtggctcagatgtggggaacacccaagcttctgtcctgagataggtgcccatatatcaacctgggcagacacacctgacaatcaaatactgggaacgaatgtattctatggcagatgaagaccaaaagtaaaacatgggctcatcttcagggacactgctgcctttttcttttgctctcagcacctcatttccaaagtgctcagccatactcaactctgaacaaactacaggtaaacaaacttgccaatgtttttactcgactaacagctgctgtcccagatacatcttttctagatcaaaccattcttattgaaaacacactgtgagccaaaatgaaggttttctttctgtggcatttaaaatttaacgggaattcccaatccaagctcaacgctcagcgcacggcatggatttcataactgaataaagtgcaaaagaaagggaaggatgggagaagggcaatctcccacgaaagatggggttcaggcagtgggcctgaaagggggtgacagtgagagacatgataactagctccatgtcacagcagacaggccgtgtgtgcttggtctggtcctcacttcttgaaaaactccatgaaaaactgatgcagatacctagagtatatctctgaaattattttccagtagagaagtcctccctcttccccagacacctcagaactcctatgattgaagatatcccattgtggatagcaccactgtcctggacttttaccacaacctaagctttcagactccactgtgttatttcagaaacttccctctgggtaccatacccaaccttattccccatcaccctttcttattactcagctctcaggcagtgatggtcacctctgtgtactaactatgcgcccatagtcagtggcttacacacacacagtatggtaaaaagagaatccacagtgatggtcacctctgtccactatgagtccatagtcagtggcttacacacacacagtatggtaaacagagaatccatggttacaaagatgcttagagaatccctgtctgcacgcccctacgggaagtccttcattgttttcctcatgtgaaggttcttcctgtgtgtcttgatactgtctttaattgacagttcctagaaagaactgtaacctcagtaaccccagagctctgcttctgctttgtgcagttttgtgtgtgtaacagttgccctatggcatctcttcatactcaggatatctgtccagacagttgattgtgtggtgtctgttgctttacccaggagttagagggattgctcatgactctgctcttctttggctggagaaccttctgtgtttcacaccaattactttaccatctgtgcagcacacggactccagagtcttctcccattatatgaggaaaccttgtctcccaccaacagccattaaaattcatttggctcttcctcagtgtcccaggtggcaatattattttccttgctgccacttaagaactgtagaagcattcttttatgtcattccttttttgtttgtttggttttttattttgttttgttgtttttgttgttgatgttgtttttcttctgaaacagagtttctctgtgttgccctggctgtcatgaaattcattgtgtagaacagactggccttgaactcacagagatttgcctgcctctgcttctcgagtgctggaatcaaaggcattcaccaccaccaccaggctatgctattccctttttaaaaatgcacatgcaagtgtttatttagtgtgtgtgtgtgtatgtgtgcatgtgcagacacaggtgtgccacataactcgtgtagagatggcaagataactttctggaatcagttctcactttccaccttattgagtcagggtctctcttgtttgtgctgctatgctatatattccagacaattgtcctgtctccacctctataaatatgagccactttatctgccttttcaatatatgtattccagagatctcactcaaattgtcagatgtacatagctagcgttttttacctgtggagtcatttctctggccccagtcccttttaaagtacttcactgtttctggacagaatgtttgggtattcttcttggacctctgtgtctatagtctctcgtaattatgcttactctgtgtgagatagcatgacttgttagtcagaactctagtctatgcctgactttttgtgcccctgcttgtaaaaagatcctagtgccagttgcaactctttctcttccaaggtcaaagtgaaggtgaagtaataagatagtcaatccaagggaagatgtctttatgtgacccccaaggggccagccctaaatctaaggctgccctgcattgcagaaggttcagaattagctgataacgaacactacattatccgaggcttaactgagctttgtgatttgggtaaaggaaagagatggagaaatagcttcacagagaagcaagcttgagccagggaggtgactcaatgggtaaggcacttgcagcacaagaatgaggacctgagtttaaatcccagaacacacataaagctaggaaaggtagcacacatgtgtaagtctaaggttccctcttctctctgcctcccaagctcttggattataggtaaatgccaccatgatcatatctttacacgtgtgctggggatggaactcatgtcctcaagcttgcatggcaagtactttgtcagctgagccatctccccagcccaatttaatccttcttaatctagatcacttatttgaaatgcttgcatcttcaatcccaaattccaatgccatctcctccagaaagccgtggttcttctccaggaactctttattcagtcagtcactcaacacatttttatcaagcacctacaaatgctagataaacaaggctgaagaagacacacatgtcttgtgctgggctatggtgtttcaggatgataaagagacaataagctaaaagatgcatatacaaattttgggttagttggaaaacaatggagcaagataccgagtcagagaatgatgttctcccactcatggtaaaacatgggggaagcctctgtcttgtaaacagtgtgagacaaacacagaataaggaccataggagagcactgcaagtgggagctgcagcaggcaccctgtaacaaagcagacctagggtgtgcatttcatatgaacttaaggagaagctcaggtcacgagcatattccttttgacagggaaaatttggaatgattgaatgaccaaacttaaacattgattttatctaagagttcgttgtatctttaatgtcttgcagtttccttaaatcatcaatttctagtgtgtgcttagaagaatacaccataaactgaattatacaaaatctagttataccacacacacacacacacacacacacacacacacacacacacgcgcgcgtgtgtgcatgcacatgctagttctacagggagctataaaaatatgtatatgtatatgcatatatacatacatatatacatacaatagatgttgccaagtgtcagcaaaataaaaaatgagtttagaaattctatttcattaatctcttactacagccacaccccacccctttcctatggaacacacatgactactggtgaagactgtggagtgctgaagactacagtcctcaacttcttttatttctctattacagaatgcttaggtattactagactctaacagtttctcaagtaaaatctagatataatcagtatccaataacacagatttctacccttctcttcacccagttactgtcttttccaccgtcggtccaccctggctcattttactctaaagatcacactgctaaccaagctgacgcttgggatattttgtcatgtttagactgggagttaaaataccaaggggcaggtttttatattttccaataaacaaatttttgtcaaagaaggaggttcaggtgagagatctagatggtcataacctgggttctgtggatggactacactgaagtgacactccctctgggagcaaggatttatacaattcttgtttctgcctgtgtatttttgggctcttcctccttgtgtacttcctcctgtgtactcggcaaactgccctgagctgtgtgactgaacataaccttaagactgggaagttgccgcatcaattcgttcgtgggtctttgttccctgacggaagagctgaagtatttgttctttggttcccacccactggtagatagagatacatgcttctatacaagctaaacttgcaagcaactatccaataaagctccatcttacagttgtttataatgtgcttttgcttctaaatgcatgtgtgtacaggagaggggcagtcaagacgggattcctgaccttcgagacaagtttagccaaagattctacagccactggtgattttaaaagagaaaagagcaatgattcttacattgttatgggtatgacatagctctacaggttttaaagcagcagagaaaatgcaaagccaacttttttcctgagacattagttgctatgaacaaaaacaagccaagtttggtttgtgtgcagagctatcccagcatgcagctagcaactgggcaggcagcaggtcctggcatgggcccaggtagcttggctccctgcagcagtgcaggaacaacctagctgatgctaggctctgatcaaatttccagaatcagattcagaattatctgctcagctttcatgtacctaagaccatattttgtgtaaagggtttttgtcccctgggttgggaatggaggtgggaaggtagtcccttggtgctggtaaattccacagtagctgttatctgcttaaagacaaaatattgggagctcacagctctgtggggtaccactatagcacttgcttggtgtttacaccagaattgatgttatccaacatattcatgaactttgatatagaactctctactcactggcaaaatacgaaaggggtcacagcagataataaatccataggctaccactatttgctaccttgtcacaggcacctaaaatctcctatgctcatttgggttacttaccactactgccatttaagtgaccagccaagtgaccctgccaggcctagggacatgagcaagggtgatgactgtgtgttctctgccagtgctgtcctgtaagtgtttaagaggtatgacggctctaccactgcttaggtgaaaggaactaaagaggtctggagtgtttcagctcctcttctttcttctggggccataggcagcacacaaaactattctaccacacatttgtgtgcttccttagtgaatatgtcatactacaggactccaaccagctgttcagtgacagatttgttctttctttcctgtttactacatatgcaccatctcagagaagtagctacatttccacacaattcttcagataagcgtgatattctcttaaaccaaaaagagaaaatgctatatccactgggagtactttctattgtttttgttgttgtttttgatgggggggggttactcctttgatttggaattttgctcatgtttctttgaagattttctgtgacatttttatacatatttactttggtggaccctcattctagtccctcctggtatgctgtggaatatttgatcatactgtgacactcctagactgttaaataaagttcaccgtgagtcaggagcagaaccagtgactagctgactgcagttggcaatagagaagccatagagaagatgcataggaaggaaagagagggcacctgagtttggtgtttcttctggggacaggtaaagggatgggtttcgaggccaaacagcaaggtcagctggttgcttctcagcttctctgacctaggttttcatccccacatctgaccttctgagtctttattggtaaatagaatgatagagacttaatttaaacctacatatcacagccgtggctgggcactgactgtaggcctcggacagtaattacaatatcagtagattgatgagctaagccaacagaaaaacatcactggtatgtttgtgtttcaagacaggatatccttaagtagcctaagctagcctggaatttgtgactctactatttcaacagcacaaattttggataccaagcacatatcactgtgcaaccagattcattattgtattcagatggttcgttttctgatggctccatgtgcttcacatattccacaaccatttccacatttagaccatccctatggctgtgtaaacattagttcaaagatggaaaacctgcagaccagagaggccatgaaacctacccagagtctcaatgggagccaggacttaagacagccaggcaagcacattcctactgaggggagtggtctccccagcctaccccggctgttctaatgctagtttgtatctctcccttgcatttctatgaggagtttcaggacaaatgaaagccctcaagctctcttgtgtaaagaaagatttcctcactgaatctgtagaatctctgagagctgcatgttcagaaaaacacagagactggagagagtaggattggggcatcaccttctgtgtccctgtgttgtgaacttcttagcttctggctgcaattttagctgaagtttcttctgcagtgacatcggtagctttttcccagtgacttcagcccatccagagctgtgagctgccccgatggctgggattagcccagccttctgatcttccatagaatccacaccctccatgggagaacttcattcacttctgcagagtgcattgttcccaaaggaggtaatgggcatgcccaaaatacattgttaaaatatgaattacttacacttgaaacaggactctgtcagcctgtttccatacgctgtggtggtagaagcctatgtgctctggcctcccagctcttgaactatgtgtctcctttctggctagcacaagattccaagactctttgtcaggcaaactcttgattatttgggactttaacttcctcaaggtgtatgtcttcactcatcgtgtgaggctgcttctaaagccagatcctggccactgaggatggctcaaacaattcaaaaaggcaaataattcttagactctggctaaccaaatcttttaggtatcccacagtccctgtggtggcccagggcaaatactgaagcccatggaactaaatgtgaacaaaaggagccaacctgtgattagaccacaagctgcactcatccagtactccatccagaccaaaggtgactgacagttcagaacagtccaagtccagtactggggaataccatccactgtgtccttatgacagcctttaagtctcctcaccatgtttaaatcatttttaaacagttaagtatcaaaaaacagttttagtgggaggaatgctgggcactggtgaagagttttaggattttgttcctattacttttttctacttgtgtaaagcctttttatgttaaatgagaagctggtgaggcaaggaaatcaattgtaattaaacaggtcaattaaaaacaaagttttcagagttttaaaacagaagaatacatacacgcacacgcacacatacacacatgtacacacatgcacaggtatttgaacgaatgccctaattgctgactgtgtagagcacagagtaatgacagtcagactctgcacttcttggagccagtgtctgagtcatcagatatagggtaaccctggcttcccaagtggtcattatgttgtcatagagccaacaccacccataccctacctcaaggccacccaaagcagtagggcatttggggccttgaactatatttgactataattattacactaagagttcataatgcatttagcaaagtagattaagtgactacacttagtctggtttaagcaaaacagttaataaggaatattgttcttccttaaagaaatgaaaactccagggtgagtcaaccgcaggaggtgcagggctaagaataatgaggaagcaaagatctgccttcaaccctttgtaaagtgttttctgttcttaagtgtaacaaactcagccttcatcatctttgattctgggaacagtgtcaagcctaagaaacaattggaaacttgccgtgctgtagcccatcccctgctggtgttccaactggatccaaattgaatatctcttttccaagtgctctaaataacactcatgataagagctgggactcagccagcaaaacctggaggctgacatagccctctgtctccagggtttctaagagatggcccagggcatactggccatttggctctactaggatatagctctgccctccccctattccccactacctctttctctccccctacaccttcgaaaacagaaatcatatagtcataatcccctggggcccatgttttcaaaaccccttcttgatcattgacttggatcatgcacctgcaattcctgtcttcaaggaactcacttgaaaaactcctagaagagaagctattaccaaacattctttctgttactcccctgttagacattttggcaggcaatacagtggagagagggagggcatggttctctatcgtctagaacttacaacttagacatgataagccatgcagaaactacttcagtacaagactggactctgttacaaaagtggtagcagatagaactgccctcgggacaggtaagaatagaaagtgttgaataagaaaactgcatagccagcaacccaggctacactaacatagtccttgccagttgaaggaagtgcttacacaaaatgtcttaatttttatctttagaattagaatgtacttgtagaaaatttagggacatccccttgcttttttgaaactgttattatatatactataaagttcaccttttgtgaatattgtttcccaagtagtaacacctgtacaaacaagtaactggagacatattctattaagagaactttctcaccacccagtaagttcccatgttgcagtgaaatcatgttagctcagacactggccagtatagtacacaacactatagagtattgtgtagaactctgcacaagtggaatgagagtatgtcctgtttctgtaattacacagtgtctatgaggttcactcctgtggctgtgtatgctagtggttcagtgcctttaggtaagtggtatggagatattctactatatgagtatggtgtaacatttatcaattcaatcaacagctgagggatgtttcagttgctttccaatttgaattttgtggaaacataacttttcttttcacttgagtaaacatgtaggtaacccatgagtggggctggtaggtcaaattgtaattatatatatgtaagtttataagaaggtttcagactcccaaagttgcaccattttgttttcctacctactttcttgaacagtccagttagttcttattattggaggatttagaaacagggtctcactggaatggccttggctgacctagagctcagaaccccctgccccggcctctaagtactactgttataggtgaacatcaccacttccaactccagatatccttaatctgggggactgaaacacataggtggactgagataacaaaagaccatttctctacctcaggatactgatgtgcaaacatctaagcaactgctgtcaatatcacatctgtgctaaaagcattcattttatttagtgagtattcttgtaattttcccaagttgtacattctgagaaaaatcactaagagccattttggttatcaaatattctaaggaatgctcatttctttcagacacccatgctgacaaactcatggtccttacatggcccacagtaaagatactatatcatattttccctttcgtatatacatacacaagtgtgaacagggaaaataacacccatttcataggttcctataggacgagataggagatatagaaaagatcctcttacaaggacatatctttagcagttatttaatataaattgaagagagagaaaggaaacattacaataaaacgtggaagaaaaggcaggatgatgataatggcatcactttgttgaacactgacctatacttttttacatagatcatcttgctaagtactcatgataaccccacgccatgtcaatgggactattgtctccatgccacagaaattgtcacatttagaacaaatcccagattgggattattcttcatttctaatcgcctctactcctcaaacttacagtattgtgaggttcagaagaagggtggacacactgtgtgatagacctctaccattgaccttttaggacataaatgagtgtctgtcaccattacctttgggcctcaagtgcccttgagtcctgctttatacttgcacccaaggctcagtgaggttttggtggggtgtttctgctcagctctctgtctactcaactgcttcccctccatgtaaaactgcatgctgtgtagcactctgaagactgtgcatgtactcttccacccacagagccagatgctgagcttctcccatcatggcaactagtgtggttttcttagctattatgttcatctacacacttttccccaaagctgagtcacattaaataaattacagtggcttctactaaaaatgctgataacaatcattcccctttttactttgctttttcaggagatatcagctatctttggacttatttctcctctaagaatcttagagtgtttaaaaatattaatagcagaacttttttcaaaaacagtttgtagtgttgcctgcacacaccctgcttcctcccagacaggaagtggagttttcttgtagtcctgcctgcacacactctacttcctcccagacaggaagtggggctctcttgtagtcctgcctgcacacactctgcttcctccaagacaggaagtagggttctctaaatgacttgattgtcttcttccttcttttctgggggatgaggcatttctctgtagcacaggatggccttaaactcaccacatagcccaggatagccttgaactcactacctagcccagtctagcctagagatcacagtgaccttcctgtttgctgggatgacccgagcttgggctcttacctacaagctcaactcttaccctgatgtctttcattcccacagccctatcaccagcctctaagcatccagtgaaaatagaaggtaagagctgtgagccagtgaatgggtaacagtgggagtttgccatccgctgaggaactggtaccagagatatgggcaatgtctgctaacacagtccatttctaagagctgttctcattccatccttgacctatcttccagctggaaaactacatggtctgagtaatcctctatagtatgttcacaggaaaggacagttttgtcttaattatggcccatttcagaaactgaacggtctcccatgtaggcgaagaatccacagaagacaaccctagaaatctggctattgtctttagactagcagaatttttaaagtattaaaaaaaaattctcttagctcacggtccatccctaccaggggaatattgcttcacaaacaagatgagaaacagttaaaaggtaatttcctgaaatggtctcatgtggaacaaattgaaaatccacagtccttcaacagagaaattttttcattacttgatcttttaaaaaattgtttcactcttcacttccctagcagatgttacaaatttcagaaacagacaagggcctttggattgaaatgaaaaattgatctgctctaaaatataaaaattcagtaaaaaattgctggacagaccatgcccctggctttgcagatctctcttctgttttgtttagagttcatcaatcttgtaaatactgccctcaatgtgataaataacatctttataacctttaaaaaatggtccatgtattgaagactatggagatgggatgctgatatgggcatgatgtggaaggtggctattaatgaagcactgtcctcacaatggctgtggctgtttcccaatatgccattcttgtggtctccctcatctacataaattctctcttcacacctcctttctccattctaattctactgcctagcttaaaaaaaaaaaaaaaaaaaaaaactacattctcgtttattcattctataaatatttgagtgtgtgttatattctaaatattttggtgaccactgaggatgtgggagtcaaaaactagccagaagctccctggagtttagtggctaaaggggacaacagacaattaaataaacaaggggcaaaagtataagaaatgtcatgatgggaggaagtcaggggacatagttggggtactaaaccttaaagctaattttggggctgggaaagcacaccagagaagggctgtttaagctagactttgaaggtagccaccgaatgggcaggtgctatgggctgcaccccgctgagcctgtgcactcctccatgcggcacattgtctctggaagtttcttctctttcctccctctgctgactagaagacctcctttaagcagcatttttctcaacattgcctcagctgctctgctccattgatagatggacatcccacttttatgatcttcccacatcttttcttctcaagtctgagcagcagatgagctggcagtttaattaatctgtcaattttctgagggagtcaaatcctttatatctgattctggccttggtctcagttacctcagtgtaggggcctaacttttcctctgtgccttctcacttccttcccagctcagnnnnnnnnnnnnnnnnnnnnnnnnnnnnnnnnnnnnnnnnnnnnnnnnnnnnnnnnnnnnnnnnnnnnnnnnnnnnnnnnnnnnnnnnnnnnnnnnnnctttccctgctcagggcttaatggccacacctgctggtgctatgcctgcaaattgctagtgacagtggctgcctgtgtcttcctagggcctcttgtgagagcttttacggtgagtctgaaaatccttgatagtccattttagtggatttctgttgctttgataaaacaccctgacaaaggaatttaaggaagttcattttgccttggagtatgatgtggagaggccaagggggcaggaagaggaagcacctagtcacactgtacacccaatcaagagccacagagccaggagtgctctgctcttgcttactatctcattcagttcaggctccccagcctgggaatgttaccacctgcagtgggcagctgttgccaccataatcaccctaaccaagattgttccccactaacaggccctggataatccttcacaggtctggccaggtcctaggtaattccagatctcatcaaggtgacaactgagattaaccatcgaagccccatagaccctgccccactgatgggggtgcccatgtgtgtcctgctgagtcactaacataatctgtcctctaaggatgttggctcagggttcccaatgggacatcatgccagctgctcttgtccagctgcatcctggtgagcacatgggaatgaaaataaaaccattcttcagctgcctcgagatgacctaaagacaaaatacacaaacagtgactccatcaagaggcaaaatctgtcacctatagctggtagcctaccaggcaaggcacacttggtctgcatgttgactgcagactgagagggaagcattgaagaaaacctgccccataggtatggagcagcaactggaatcaggttttctcattagctgaatgtcctcccaagtgcattccaccaccctctgcagggtgctccatccttatcccacctgattttccagaactcgctatctcacaagtgaagtgtagccctaccatctccctctcctttgcaggatctcttgagtctttattgatgatgtgacaattgtctgtttatagttgaatacaaagagactattctcttcgattttaaggctaaacataatactaaccagcctgatccttccacccatagcttccaacatccttcttaacatcacatgacctcattcagctaagcctttcctaataggctaaatgcttcttctaacacagatgcctcaggtccctatgaggccctgccatcttcattgtagacaacattagatacctagtctatttcacacctgagcaaataggcacagagtggttaattgatctgtctcaggacaaacatctgcactccaacccttgtccttctatctctccaccatacagttctttcctctgcagatacacatggggacttcagacaggcaagggacagagtgacataaatccaacaactgtcacatatgctgacaggaccaagtgactcttgtcaaatcagctccccctcatcctctgctacccctccctgctgagggaaaaagcctaatccttctagaacttgtctgctctctgtaccttaatcctgaggtgccatctgttatgcctgtggacacagatacacatggcccatttaactgcagtgactcaggacagagggaggaaggcaagaaactaggacaccttccctcactgtcacagactcccaaggcttcagacagacccagtacaggggcttgagatggagacaactggcacagacacccaggagaaggggcagtttggtcagcaaaatgaagttcaagagcttcttcaaggtgttctgagccacaggtgaatatagggaagacaaaccagagccatgactgctctcacagcagtctttggtacactgggcaggtgacttccaggaacaacagagctcagtggtagactgttggtctcaaatgggcaaagattgccaaggggcaatccccagcaccccaaaaatccaagacacagaattttggtccctcttctagctggcataggaactgtccagcagctctagaaagtgggtacacagtaaatctgagctgtcgtggatttcaagagttcatccacttagctttagccctgtgtgtggcatttacatcccagggcagcttatcaaacactcagtggcaccagccgacctgttaaccaaaactcatcagataggactctgtcttataacaagatggcaaagtgcttcatgtgcacattaaagactggtggagcccggagcaagagaaatcactctaagataggtaattttaatatggaaaaggagacctttatgaatctgagtcatgcggttccagtagggaggacaaggaggactcaaaaccacacagaagacaccagagtctggggcagagagagcggctgcagagaaaggaggaactgatgctgggccatgagatgcttgtgcttttacccacttgtgcttggggaaggtctttctgaactttgctggcctttgtaggggtttggtgtgaagtgacattcaaggagaatcgtgtctgtcttcttaaccaggtgacatctgggctcctttgtcaaaaatatgaagagaaatttacagtctagcaatttgacagctctttttctcatttatttgtgggtgggttgggggggcagacagatttctctttgtgcctccagctcatagaaaacaacacagagacttatcattaactatgaaagcttggccttagcttaggtttgtttctaaccagctctgataactcaaatcaacccctttctattaatctacatgcttccacgtggctcgtggcttttacctctcctcctgagtgtcctgtttcctctctgtctcctctggcgtctctcctgcacctagatttcatctcttcttccttcctctctgccagagaagttccacctaagctcttcctgccttgctattggccattctgctctttattaaactaatcggaagatgccttggcaaagacatatctccacagagcacaaaagattattctacagcaggagtgcacatgtggaagttaaaagacaactcacaggagctggttctctccttccaccatgtgggatcccagaatctaatccacatcattaagcttggcagcaagcacctttattgctgagccatgtcaccagccctggattgttctcttaaacaaaagtttacttcctagatgaaccaacattacaatcagatcttttaggagtcatgtcgtctaaatgtgacccatgccttcagctagacagtttccagtagcttatcagcacaggtgtctgcttttacatatgttatcattagcacttggctgctgaagtaggtataatggggacttagcaagttgtattaccttagcccaaagaaaatctgatatgccaagagctacttttgaaacaagtggattcgctccataacatgttccatatgtggctaactattcaatagaaaatttgtctgtgattgttagagttcattgagcaggcacttctacccagaaacgctcccactgaagccattaccccttgtcgttaggcattagcagcccaatctgcaggtactatattcaacacagtttctgtaaggattcaggcattatgctggcctgcccttgtcacctggcagaatgcactcaggcagtactctggtcagcaaagtgttccatgattgtgtagtctgcacataggtacaaaggacccctttaaaagacagacccctgcccactttgctctcttttccagttctctttcactctcctctctttctgctctctctttcctgctctcttccccactgttcccctgggtcagacaggacttttcctgtctccctcttctcttctgtcctctctctgtctctgcatctctttacctcttttctctttccttccccctccctcccctttctaatacaacttctcacttaagctctgtctgcctggtgtgtttgtcccctgcctcagccaaccttgcctaccatggaatcaatcatggtcccctatgcaaagtcacccttcaagctttattataacagtttctgtaaggagagtgtcagcctagattatatagatatgattgtgacttcactcgtcacacttactaatattatcctaatatactaaattgtatatattacaaagcagataaaataagggtcacaatttatatcactaaaatatttcccatttcctctaagttaccgtcataagcacatgaagctacctcttacaaacagcacccttccacatttagttgtcatttctcatttttctgctttacttttcagtggcactccttaaaaattttacctcaaactccttcttcccacacacttccctcttcattttatctcagtcccactgcaaacacagttttgtctccagacctaacacaagagctcctgctaaagccagggtattgattttcaagttcatttcctatatgctgtcttcctccatccttaggtagctctgcatccatccatcaccatcttctgacaacctttccctattcatgttcagggcccctttggctggtttcttctttatctaccagacttaagagatgggtcgtattaggtgatagagaaggaaagcgtgcaggcagaacaagagtatcaaaagaaggtataaagttaattgttttcccagtttcaactctgtaatggtgtccttttgttgtgaatgtgtgtgcaaaaatgcaatagacagtgaaagtgtaaaaccctaagcaaagctccatgatacagtgtgcaaacagctcaacaggtcagagtgtcctttccaagtagctcagtcggactaagcctcttctagctcatctggtctctgcttcttgtagtcagctcagctgtctaaacttctcctgtgcagctcagcttttctgaggttctttgagcaggtcttgtgtgtgcttatatatgcttgtgagggaggggcctagtaaatttgttcagtttcagggacttcctgctgctattttgagtgtttacttcatgctcttaaggaccttccaggtaggatagagccattcacctcccttagaacatcctgttgcttcagaccccctgtaatattcctgttgtttcacctcccttttttaaacattcaatgttttaatgagttccctctaaaatagaaggttttaatccccaggaaactgctacccaaaagggatcctttccggacttctttgtctcacaccccacatccagggcatcggttagtcactatttagcctttgaactagaaagacacattacatcagttagaacataaaataataacccgaattgagtcaaaatactcagattggatggttttaaaatatcgtctgtgaccatctcaaaccctaaactcatccttctacagtccagcagtttttcctcacaggtcactcatttttctccacagttccaagctcactggtttaaaaggtgattctaggaggctctggttaaaagaagtttgctttctgaaagggcttgtcatcaaattgctgtgggctttatgaatccctgatacctctgtttccagtaatgaggtggtccttctgcttggtttctttattttttacttatatgttttttataattgctcatgtgaaacaatgaattcagatcatacccacaccccactcctgtcccagtactgttttctccctcctcttactccttcttcctgctaacccactgagctcagttagtgctcagtgtatgtgcagagggtaaggccatttcctgcagtgcaagcaacttaggaaagaccacacccctaagaaaagggacaccccccctcctgcagccatcacctgtcaaagttcctcagttaggggtgggtctcatgagcctcccctgtgcatgctggggcattgactggcttaatcttgtggcctcacagcattatactcaagggggacgtactcaacatactctgctatttggtgtcctgctttagcttttataaaactgtgggtgtatgtgtcaaaatctgcttctggaaatctgtcattatttaattctagttcatctgaaagagaactgaaaaaatgtaaagaaccctggaggatcacatcctctcaaggttaaatgtcactgtctattgggaaagcagtatgtttctcttgctcatttttgttgttgccattattcccataacctttgtcccttatccttcagaaattcgtgtcttgtaagcaatcatcccatttcatttcacccccagttcacagggaacacagtcacatcagaggttaaaagtgaacgaggaactcttcaggtcctcatggtatgacccagcaggacagataaacagtgcctaagctcaggaccagaaacacagaaagtagatcaggatgtcactgtgacatttgtcacctgaggctacttaccgatgctcgctcacctcaccctacggctctactgtcttgtgaaatagaatatttgaaagaggattcctgaaaatcatttgattgctgttcagcttgatgtttcatcagcctagtggctggttccagacagaaatgttacagaaggtaagcatgcccactcacacaggactgaagtctatcaactcagcagtgataggtaaagggaacagatttccaaggttggagaaaacactgcttaatcgatttcttcaactgttctcgagcttaatctagtaagcagatgtgatatgaacggctcattgtggagctctgggtatccattcagagtctgccaggctcggaatcagagtcaggacactgtgagcagagcaactgtagatgccgagagcattcagaatgagaactgagagaaggctgcctgagtatctcttcaggcatggcacagtggtgctcacagacaggaaatctgccagactgcctccgctgaaggaacacgtgcagccaggaacaaggaaccacttaatgattaatcactgtcaacctttgttctggttaaagacgcgattgttggacgaggcttgtaatgagggactgttcagtgtctgttgctatgagattgcattcgttccctgatcctcagtggctgcaagcctcagtgctcttttgccagagtggggctaacttgaaagtgttgctacagtgcctgctaggggtgcaggagaagcttggaaagatctgctcccaagcatcatgccagagcccaagaagggacagttaatcaagccttaggcttggttcaactttgacatgaaatttttaaccaattttagaaatctgacaataagtgaaataggtaaagggaatttataaaagaacagatagacattcacccgaagtatatatgaacaaacagtacatgtatgcacatctttttcagcttcaacaagcccacagtcagaaatcaaaatgtaaaccgatgtcactgttcctgctatcatctatcaataagacattgaactgtggccaaattctcccttgccaggttccataagaggctggggtctgccttgacttgacattctctctctctctctctctctctctctctctctctctctctctctctctgttttccaaaacagggtttctctgtgtagccctggctgtcctggaactcactctgtagatcaggctggcctcaaactcacagaaatccacctgcctctgccccccaagtgctgggattaaaggaatatgccaacacccacctggttgacattttcttagaagttaaggaaaagtaattatatctattctattgttgattagagggcattttaaatcttcattttactaccaagaagcattttaaggaaggaaaatacagtatttttaaattcaaaaaaattattcttctgggttaaagtaaacttataaagtgagcattattgtatgatttttctaagatatactcttatgtgaaattatgaatatggactacctagaagtgtgagtgatactttcagatgaaatctgacaaagcaacctgcccacccgctttctctctcctccttgctcctcccttccctccctcaacaagtagatctggttaccattgtttttatgtgtctgtaaaatacaacttattgtgttttataacttgattataattgttagtgtcagagtgccacccatcccttttgcttaatccagctatagtgtgtaagacccccccggaaagctcaggccaccaggatctcagcccaggaccatggtcaccccaatcaccaggcggattcgaaagcttgatgcaaactgcacgaggctttattgttgtttaacgagctaaccccatgttagctggggccttccatccacccaccatggtggatggctaggaaagacagctctaagcgtctgcatagagatcttgtagggcagcataaggggagtgtctaggggtacgcacaggctcaggattggtgtggctccaggcttggagggctttgccctatgttgattggccaactggttgttatggcccataggccctcccagggtggtttctatgctctgtgcatcattgctgtgcccttgtccataaagcacacccagagccgtaaagcatagcaccactagctaacttctgattggttccttgccatgaggcaggcatctgacctcttagtgaccaaggcaaggtcatggcaagcacgtgttactgtcatggctgccgaaatggggagctggtcccttcaagtgtaatcagagaagctgagtaagagccgtttgggcctcgaaaaccatcagaactgcagtctctggggtactcccagcctccacccagtctgcaggtagccacaagctcttcttttaacatcagactagatcctagctatcccagtgttccagaggcttgtagaaagtaaatcaatcagtcccagtgtctcacagtagatttactctaaatcctcccaaacaggaaagattcattttccattctcaaatatctaaatagaacccattttccttagaaactattcacaacctataagcactgcagctttcattatcttgagtttatattcaaatacatgttcatatgtaaagagaggcaagataggtttttctctgaccattattgatgttatagtgggataatataattaagaaaactttgcaatgataatgggtactgtaactggttaagactttctagttggcagaggatagatcaacccggatgctacccctatgtacctgcttttgttcagggaatggcttcccctaacaggcacttcataaatcttggtaggcctgactgatttcctatccttgaccctagatatttacatgaaggagcttgaccactgtacaatgctggtccttgagcacatgtccttgaacactgttttgaagcagcatacctaaaatctttaggagagttggaaaatgtatcaaaataaatcacttcatacagaacactgtgagctattatttgcatttaaatagaaacactacatcctctctttcctgtgacaaatgcccactggtgaatggccacactctgacttccctaagaagtaactgtatttatcaaagtccatgtttccctctaacctctgaacacttgtggacttgtaagtggaacagttctttctgataatattaaatgtgactgttaatatattccccacataccaatagcctctttctgatttgtacgagtaataactgtagtaaaattggtgaaatcaactaaattatccagaagtgtagtgttttcctcaggcaaacaacaaccatccctctatttcttatgagcaagacaggctaaaatctaaggacttggcaaagccttgagattaactgcatcttgataaccaaggaaaaagtaatgaatgcaagcttccagaaggagggtgaagacagagagcaagcaatggcaccctgttgcagaaggactgtagtctccacaggcctgccattgtcacagtcggtggtattcacttacctgaaaccaattgaattgcttttcctaacacggtaaggctaagaagtcacattaacaccacgcctaactgtgttgttttgtatcaaaacagctcaaagcacgtaggtttaattaactctcaaaatattcacatgctgcattttaaacacagagagctgaagctggcctggtactttgaaaacggcaacttttaaaaatgatgctgacacccagtggtgtagatgaagccgtttctacaagaggaaagcagaagtgagtaccgtgggagaattagatgagcgccatgatccccagctaaaaaatctattaagcaaatcaggccctcgggtgagataatccagctgtgtcttgctgatgccaaaagaaccacagtagctgatgtagttaatttaaacattcttttcaaaccaacttttttttggcactatgcatgtatagtaagtagttgctattaagctccatgatgtccaaagatgtagcatttcacaagcttggcccaagctttgctaatcttatggggaactgatgagttgttgtttttaatttttctgttctgtttccatctaaggatagctgagtagcaatagttttaaactctaaaaggatcccattggctccaatttagtcatagttttgatttaactgttagatgtatagtaaatgagctgttgtttggatctagccagccaccaaggagttgcagcagaaccagttgtatattctcttcagaagtaccacaaggagctggaaagcacaaaagtgtgtaaacactggaaattgcacagtgtatcagttttcatgcattctctcctgagcggcagttaggccacaaacgtgtaccaggttgaaaaatggctggacagttccaggtccagtggagaatctgttttccagttacaagtaacagaacccaatgcaaccaacctacccaaaattgctaagaaatgggggttacaagttcatgtccacctgtattgtggagtttacaactgaggtgttcatggtaagcagaatgatgtctctcagatcttttattgagcaactactgacattccaagactggatgtgataaccaacttttgtatttgtaattttaccaaaagttttcagtattcatgttactttcttaatatttgggtaattgtgaattatgctctaagtgaagtttatctgatttttaatcaaatgcttacctgttacttatttgacaaataatttcaagtatgaaatttctccgagagattcctaatcctattactcaacctatcttacacttctcactcttcttttctagagttgtagctacaaagtagcagagtggacagctgtgcagttgatttaatcaaaatagctagaaaatataagaccaaaaagtccctgtccttcctcattattggagtagatttttttttattcaaggttattatttgtctaaagtattactgtgttaccctgcacataaaaacatatttgtatcatttgcataaataagacttggtaaataacctgattttctgggaactgattcaagagaaatctcaactcttttgaagtgtgtcccttagagttttaaggagaactggcttgtttgaagtcccattgaagcacttagtggtttctttcctaatccagggaagacttctgtgttgtgtgtaacagagaacacatggctccttccgacagtcccgtgtggccattataataaagcactcaaagattatcaaagacactgtagaccacagagacattgaccagtcagtgcacattgcttgtgcctctgtggttccataacagtaaatgtgacaatgacaatgaatatatgccccatttctcttatgagcaaatacattaaaatgtgtagattattttagattagttttgcacattttagtacaaaatggagaatcaaggcttaaaagtgatccctaggaaattgtagggtttaaaaaaaatgtgtgtttttttttttttttttggattcttttgtacagagccaaggagaagacagacattatagaaatttcaaaacactcacttaagaagttaataccagagctacacaattccacactgtgctttctgggatttatgtgtgtgaatatgtctggcattcagtttatgtttccccagcattttcattgcaagcctctattcatttacaaaagaaaagccacacttttttcaccctgcccattggatcaacccattctttagaggcaagagctttgttttgctttggtttggtttgttttttttttgtttgtggggtttttttgtttgtttggttggttggtttggttttttttttttttttttttttttttgagacagtgtttctctgtgtaggcccaggtgtcttggaactcactctgtagaccaggctggccttaaactcacaaagatctgcctgcttctgcctcccaaatgatgagattaaaggtatgtaccatcactgcccaccaatagaggcaagagctttgcatgaaatgttattaatcatattttagactcagctaagaaatagaacttgaattgttttctcccaatagcatttattgttaacttgagtatatacaaattgaatttcaactattctgccgattagaatttgaagattataatctaaactccacatcttaaaaattggaaagtataaggtcataaagaaagtctaaaattaacaaggttcataggttgcagggacagactcttaaaggattgcacttatgtataaaaatgccttcccttgatgcctggtgcatctgtgctgcagtgttaacacactacaaaccctgtctcttacagcaactgtgaaatgcatctctcctaattcaggagcctgaggaatataaagtcagggtaccaacatagatgtctgctgaggcctcttccattggtggcttcttcactcaggcagacagaagaaggcagaatggaatgaggcaattcctcttaaaagggactccagtcctttcacgagggcagagccctcatggttccactatctttcaagaggccctaactcttaataccagcataaggctaaagtttcaacatgagtttgttcaaatgtgtgctagctgggagtggtggcacaaatctgtaatccagaattcaggatatagaggcaggaggatcaggaattcaaggtcagcttcagctacatagtgaatctgagaacagaacgagaccctagctttaagagacagacagacagacagacagacagacagacagacagacagacacacacacacacacacacacacacacagagagagagagagagagagacagagacagagagagagaggggggggcacagctgtcaagagcatcagctgctcttccaaagacctgggttcaattggtaacacccacactaatagtgatctgtaactcaggcccagaaaatccagtggcctccattgagacttgcagacaaaacacccacacacataaaatgaaatgaaaacaaataacccccccccaaacattacattccttgtgaggcaaaggctgtaactgatgtgatcatggagcccctcagcaatcattcaaggcatcgttagttatttaagggaataatgtcaacaccatttacaagatacagtctaccaaggataaaattgcccacaaacgcaaccttcccagtcttgtttcatttggtagaagcagaattgataattttaattatattatgtgaaaggaactgaataattattgctcattggtgtctagctagtatcagtataaactccacattgtttagtcggttgtcatgtggttcaatgacgttcagtaactatcaggttaatttaagcagagagattaatgtctatctttaattggattcataccaaaaactttactcactttgtggttgtctggtcttcaaattttcctggagatattgttaaccccatacatcttgttgacttcagccagttatgactgttgcccacctttcaaatggcatttaggacacagaaattttctaaatattctgtatattatcaaactcatctaccttttagaacaagtttatttttatctcccggtctttaaaattgggataatagtggaaatgcagttattgcaagagttaaatgagatgtcaagcctttgatacatgatctgggcttctagtttacaaaatctgacaacttctaataggagtagttatctcaggttgaacaacaccattctcaccactgttgtcattgctgaaggaaacatgagctctcttgtctcccacgcttgaagcgtcttttcacaggggctctctgtgctaacacactcgtttataaacactggaattaaaaatgtggaccctactcctcacaataggttgagttgcctagccttgacacatggggaggtgcttagtcttactacaactttatatgccatgttttgttgatactcgtgggagacctgtcctttcctaaacagaaacggaggagggatgggttggggtgtgggaacagagttggagggactggggggagagaagggaagggaaactgtgaccaggatgtaaaataaataaagaaatgtattaaaaatttaaaaaagaactggtttcaccctattctgcagttctccagttgtcactgaagagaattagcacttcaacaggaagttctgtccttgtttctctctgaactgcttccttgttcattcatagacatgtttaaaatcaacaaccttttatagggagagtccatcatgcccagggactatcctgatgaacacagccatccaagcacattgctagaagacagacttagtatagactaaggagccattgtgctactgggtaacaaatactgtggcagaagctagtgccgtttgtctcagacacagaagaacttcacctacctcagctgtggggcatcctgatagacatttgagttgagcccaggaaaagttaacatcagctgggagtgaaaggcagaggaggaatattccagataaataggattagtatgcttagaatgagaaatgtccccccatatgtttaaatgcctagtctctgactgtggctctgtctataagatatttgttatgctcagaaacaaatatttggtgagcagagggtgaacttcacaacctgaggtctgaagatggtctggacacatttggagaaaattataaactttctgaaacaatagacaaagttgttgggttttgtgtttgtggaggtgagaggaggggcagaatcggtagctttgtgagatcttcatagggcatcacaatacataatacataatacaatcttttggacccactgctctagaaacaaagagctaaaagccaatttacaaagcagaagtttcatttccaccacaaagagcccttctaaagctgaagagtatctcatttaagaaaaatgtctcattccttcccccaagtgaccacatttttcccactccaccctgacccactgatgttctgttcctggccacagtccaccccagttcctcatggaactgctctcacagccaacccataataggtgtccaccccaaaggctaagaatagacacagtgtcctggtgacttgaaaattaggcaatatctgaagaaagcttcatttccatcagtgaaaccaaggagagtacaagtgcaggctcagactttcctcaggcaaacaacaaccatccctctatttcttatgagcaagacaggctaaaatctaaggacttgcctcaaaggacaaaggaaaatactaagctccccttccttatcaaactcctccaacaccctaccctgccctctccaccatacacacacctaaagagctacttctatcaggcaagctgaaaatctcttaagcaaatgaatctcttttttgagattttaaaaaaaatggtgtgtgtaaagcaacagaaacagactcaccaggttgtatttgtatacctatgtacttgtttatatgatatatatgtgtgtgtgtgtgtgtgtgtaataaagtaaaaggcaataaagtaagatggtataatggaggtacatatgaggagtttgggtagtgaagggaaggaggaaaataatttaattatatgttaagtaaaattaattttaaaattaaaaaagtgtgtgtgtgtgtgagagagagagagagagagagagcctaaatgactttatgtgtatatcatatgtgtgcccataggtgtacttgggcccatgtgcatgtatgtgcccattgagggtgtcatgtcccctggagctggaattacaggtggttgtgaataaccagcatatgctaggaactcctctgcaagagcagcaagtgatcttaaccactgagccatctcttcagccagtgggtattttatgtaatacattttctgggatttagacactcttcatccatggttagatgtgtggccttgtataattaaattccttaaggttttgagacaaagtcttcatctgaaatgtggagttggacaaagactttctaagtttcttgcattcccaatgtatgccatgggttctgtgtgtgtgtgtgtgtgtgtgtgtgtgtgtgtgtgtgtgtatgtgtgtgggggtgtgtgtgtggtgtgtgtgtgtgtaagggtggtgctaatggaaacacatatcatgatgatgtcaccttaaaagactaaattttctagcataacttggctagcataggtaaacagagcaaggggcaggaaacttgttctgtaaaggccaaatagtaaatatgtgtctttgtaagccacaaagtttcaaccacaactcttgaactctgttattataatgtgaaagcagctacagacaatatgtaagtgaaagtatgggccctgttctgatgacattgtacttaataataataataataaaaggtggccagtgggatatggtgcaccttctgtgtcatttgctgacccttaaaactgaagtccacaacctgagacagaagtgtcttgtcccaggtagcttcctgacaaaaccctgtgtagcctttgtccttgtgtcaaacatgggtcattcaaccacttcagctgcccataaccacctcaaaatgtaaaccccaaataaacgacttgaaggagcaggcttgccagtgaaagggaaccctaaagaaacagctcaggcaacttgtttctcaggcagaaagataaataaatggctttatcagcagacagtgctgaagatgaatagcctgagggaacagttgagcagttagttcattgagacagggaaagcaagaaggaaggagaaaagaaagattgattgaataacaaaccggtttgtgagctctactgtacagtcctgcccagctggtactttatcttgaatttgttttgcaaattgcagatgcctagctctggaagccaagaaaaagaaagggtagttattccagccagaataatcccagggatctctagtaactcacaggacttcgtgttcatagggggaaatcattatatatccttcttgtaaattagagacacagagagccattttaatcagatgtgtagaataacaaatattctttagctatttttttaaataacaggagaagaatacttattttctaacttttgagtcctctgtctgtgtttacagctcacaaaactgttttaacagtgactaattccgatgagccctcccattccaattgtctctcaaggaattggcgaattctttcgtttgctatctctgacatgtctaataccaccacttcctaccttgatgaagtcggtcctccctgacagtcagaatccttgtttcacactgaaacaaataattaaccacatcatttctgttttgaggcatcttttagaaaaatgactcatgtgttagctacaatttactgagattctttgttaaattaagatccatttgccaagttttgcctctactgtttgagcctaagattttcttcatacaaattgtctggttcaatatgtattctaacgtgaggcctcaaccatacacaaagaattacaggcaactgaggaaagttagtggttcaagaggtggtcttcccaatcagttgtccagtaccaaatggtcatcattgaaagtatacacacaagtaaaattacatagacccaacaggttatatttaggagcatatatgcatatataaatacatataagcatgcaataccaattgctgaaaaaaagggtcatgaatttggagtggggagggatatacaggagagcttagagggaggcaagggaaggggaaaatgttgtaattaaattataatcctaaaaaaattaaagtaggggctggagagatggctcagtggttaaaagcattggttgctcttccagaggacctaggttcaattcccaacacccacatggcagctcacaagtgcctataactccagttccaggggatctgacatcttcacaccaatgcacataaaatgaatttaaataaactatttttaaaaataaaagtagaaaagtatatgtattctagaattggggtatgaaaacctgtgactacatactaaatggaaatgaagacaggagaagttagcatcaaatactagggcattagaactaaaaacagaaaaaaaaataaatgaaagatagtgtgagttaattatgttaatcagttgtatgtttgttacttgttatcaaatcaatctttgattccaatttctctataatcttgggttttctatcatagaaaacaccacatcaatggaaatggtgtgagtcattcacagccacacagcacattcatatacagagtgtcatggaagctgaacatgtgccaactttcccgtgactttcatgtgtccttcagagggaaggctgtcttgggtgggggagaaccaggtgacttctatagtgttgagttctccgtggctgaagctgaggaagcagcaaccctggatgtggagtcagagccaatgcattggagcatatttttctttcaaaatattttatgtactgaagtttgcacaacatcttggcaatgaaggcatgtctgtgaaggaggtgtcttgtgtttcacagctaacataagggcagaaaatgtgacagcagctaaatgtgacttcagtcacaaactgaaaagattgtaagagtaccgtggtaaggtctaagagctacagagtcaaaggtgaaaaatctacccaattccaaaaggccttatcttcctctttcccccataccagggcacgtctctctcctccagcactagtttcaaatttggacaacacttgagactctaggggaaagggtcttagaatatttttggtattgtctaggaatgaaactaaatttagaaccgtccatctgtttgattagaaagaaaaagagctgcattttcttggcatgcacaccctttataaatctcagagatgggtgttgttccagatttctctggaaattattttgaagctcgccagttctgccaacaccaaacacgctgtccatctcttttcttttagttttttaaaaatcatattttatttattctttgaaagtttcatgcattaatgcaatgtagcttgatcctatctatccaccactgcttccttccaacttcccttaatgccccctagtccctctccctcccaacttcatgttctccttttttgtgttattaaccctctgagtccaattagtgctgcccattgttcatgggtgaggggccacgaactggagcatggacaacctaccagtgtacgttgtaaactcatatgcaagctgaggggacatctatatgtactcgcttccagtttcaactgaactctgtgtctctgataaagctgtcatagaacagttttcagtgacacgtgaggcctgacttacttcaaaggtaaaaagataaaattaaaaatgcactgttgaaatatcattagtatctatgagtggccatcgtggtaggacttcctgggagccagccatttgacagtgccctcttgttctcatggggagtgtgtgatgtcagtacctcagtgccattgtcattgtctctgttcccatcttacagataaggaaaactaagtcacttctgccagacctcatgcctaataaatgccagaaccagggtatggactggggcgagccactccctagagctcctgctttgtccactatacgagcattcaaagagatcaaaaaaagtctttagattttttttctacctttttgccaatcatttcctttaaacatgatttttttttcctcaaagcctcacacaaaatttcaggttatgtttttgaaaagattgttcaggttgaaatggagcagaggtccaatgactgcttccagcacattctctctcggcttgattccttccactgtcatttccaatggttcttacactcctcatccctgtctctttcctcccaccacacattctgcttctctctctgaggagccccaaggcttcagcccccaacctcccatgtatttcctcccctctttcctcccaagacactcaactcacagatcttcctctttgccgttctgccaggaactctcaagaacttgtcctcaagtccacatccctagtggcttgtaagacacacaggaggaaatgactaccaagggccatatggtcgtaaaacagaaagctgcaactgtcccatgcactacgttttggagtgtggctgtcttaatgattatgctagatccctgtgctattgaggcagctattaggatcaagtttcctattgcactgggtttcagacagatggctttctactcttttaaaagagcttagtggctaacattttaaaagagaagctaattcccaagaatggtgtgccacccctggtatgcacgcttcatgacagttcctattttgctctgttgtaagcacatacttgtccggctggggagtaagagttgggctgtctggcctctgtgtggttcctgtttcccaaaggtaccatgaacatgagctggcaattaagtgaagtaaagcacctccaaggtctctgtcatcagtggatgaggtttttatgttacacttctattacataatctaaatttttatttcataatattttgttgtgttttgcattttgttctttgagatttcatctcctgaatcccaggctggactcaaacccattatatattagaggatgaccttgaatccatggtcctcctgcctctaccaactgagatctggggttacaaaaatatgtcactatgcctagggtgattttataattgctaacctttgtatacatgagcatcttccagccattggttagataggagtatccaagcagatcatgttttctagtcttcttggagccctactggtacaaagctctgtacacctcactgggaaataatgatacttcacaggtttggttccttttcctgcagggtttctactctattaatgtctaaaacctggttgagtcctcacatcagaatggtaattcatcaatatctaatatcacttggtatatgatgtgattttcctcaccattgccagtgaatagggtgttgtccctttagcataaactgctgtgagagccgtgagtctgagtaaaggacacatgcctcctgtccagaatgactgttcaacttttaaagttttgaaaaggacatttttgttgtttttgttttgttttgttttgtttttgtacgatcagatataataaatgcacattgactttagaaatggctttcactctgtggtgcctttgcttctaagaagttgagtgtattactgtatattttcatggtaatcttctttgaggttccataaacacctcctggaatgaggagattcgatcctatgagtcagatgggagtttatccagtgtccaccattcgacctacctgctctgtttgctatgttatacaatgatttcttctatatttcaaaagcaatctccacatgtccaacccattaaccaaatttgatctccaacagaatgaagatgttggcatcgaggcttcacatctctgtgctccctgtgtcttatttaattcacagaagctcccccttctcctttctcttctacaggatcaacacactgtggtaggccagaacacaggccccagtccaagtcccaactcctgctcaaacccaaacactgcaagtggttacatgaactcccagcagtctctgttgaatcagcaaatgatggggaagaaacagcccctgcagaggccagccatggagccaaagcagcagcttctcctccagcagcaaatgctgtctgactcggtaaagttatctcctgatgtctatggtgtgtgcttcttgaccttggagaaagaaagtgtccctttgcccttctgtgacagcaatgagggaatagtggatgcaagagaaactaaatcccatgcatttaaaatgtaggggagaaaacaaacaaacagcaacaacaacaatgacaaaaaatcttaaaaaataaaaataaaaacctgatttaccagctgctaggcatatggaatacacagccctgcccagttcaggaatgtctgtggccacagggcacttgaatggagtaaatgaaatctcagttgttcccagcctcaaggggtggaaatagtgaactgccctttaatcatcctgactccaaactgatttttagaggtaaatgagttagttttaaagggaattttaaaggccagcatggagtctcaccaccaatatttagcttcctcccccccaaaaaaataatcatctcagaatgggggactgtttcaaaaattttatttttgtttcaaaaaatttatttattttaaataaatctccatgttcaccatattggcctgaccttctaagaaccacaaggttgttttccctcaacactacccaaatactagccttgcttgagtatttatctactcagtcctctgtatccgcagacaccatcatacacaactgcacttacttagacagctgctccctctgccttcaaactcctctgtccagtgaaatcaaaagggacaaggccaaacagttcagggctaatagacccaacgaaagggggaaacaagattaggagatgtggctcagaagtagagtgtttgcccagtatgcattaggtcctgttttgatctcccagcactgtaagataagaaaagttgactaaatcattttatacacaagaaactatagaaatagccagaagtgctgtgttataaacaccaggaatattcgctgaattttaaaagatcatgaagatacaagccacaaacaagatagtccctttccttcttgttgtcctaatggacccagaatccactgtgaacatcaaataaataggctattgtaatgcatatacttaaatgctatgctgtaggaatttctagaaatggcttcagagaaaagattacatctactaaagatcagaaagtacagaaggagtagggaggaaaaatggagggtcaccctggcctggagatccagaacactcgagactcaggtacacaaaggacacaaagtgtcaagtcacagagtgtggtaaggatagagaagtgaaggacacagaggccccaggaagaggcttgctaagtcgcactgccttaaatgcaattgattttaagaagagacactgagctcagatttacatccaataaagacagaggccagtaggagagaatgcccagctccagttaagaaatctgacaaatcatctccccaaatgagctaaaatttggctttaacatggtaagactacagtattctgatagacagggtagcgtccaccacgttaggcagagggcagaccaaagaccaacagaggcagccctggcttgggcttgtatttactggttagttttaggtaaaactagtaacaatgtacccatcacacatgtgtttaaaggaatgataagtttaagtgagtgcttatgctccagatgtctgaaatctgtggtcacaccttttccttcctcctcctcatctttttatctttataaccaaaattgcctagaaacaagggtgaagaggagagaatgtgccatttcaaacggacttcctggcaagacttttattattcccattgttctgcaaatttgattagttttacaagatggagtttccgggttttctgcttccattaaaagcccctgtcgaaaagtgacacacacattcttgggggcctggtgatggtgctggcctggctcccattgagcccctcttgcggctcacaggtgcaaagggtagtggtgggatgactaagaagggagctgcactttctgtggttgttacaaagcaacttcgagggtgcctgtgctctttagcatttccaggaagaagcagcctttgatccctctttacattagcatatgctttgtagtaattcaaggccttggcaaggccagatgggcacctaaatggaggtgtttttttcataaaagtttgttagtcttactctctaccattcttccaccagtgaaacacacaaaaaagtgggataagtagcagttactctactgatcatcattgctagcacgtagtagaaacctcctgtgtgccaggcaccatgctaaagttctgcagaacaaaaggattcttccttttgtatgaaagagatcctagaacctcccaaatcttactttttttacgtccaaggaaaccaaagcaagacagatagcactgaagcaagagagattggaccatgatgaaaattcatttcattttacacagaggtgatttcagtgatatagtgtcagtttacatgggtgtctttttgtagcttcctccattcagtgttggggtccagactttactgtatatatattattggaatgtaatatataatgtaatacatataattacattccaatcccagttccccctccctcctttccttccactccatccatccctccctcctcccatctgctccacaaagagggtaaggcctcccatagggacttcactgtcttgtagcattgagatcaaagagtattaagaaacttgggttttcagagatgtgaatgctaaggctttcagcaaatcaactgatctgttggagaaagaaaaaattcaactgcttaagatacattaagtaaagctctatttgaaatatagtgtgtgattgggagtaaaaggaactaattttctctctctctctctctctctctctctctgtctctctctctctctctctctctctctctctctctcacacacacacacacacaagtgcatactctgtcatcacacaaacagtagtaacacctaattatatatgaaaaatgcttcttggaaaagagatttcacaaagtcccattcttggcttaaaagtcaaaactgtcagtttacacaagtttttatagcagggttgcttgctcacaaccacattgggttggtgaagtccccaggctctttcttaaacagttagggtttgggcaaccccccccctccaaaagaaaagagtttcactgaccagtttttcccttaatttgtaaacccatgtttaaaagaagaaatgtaatacatatgcttctgattcatttacgcttagctcatcaaaattatgttttatatgaattacttggtgttcaaaaacactctatgagtctttcaagtttgtttcttcttagaaacaagaactaaatttggtttgttgttattttaaggccctttcctgccccttttagagaacacacatcccactaggaaatttcagagctgagcagaagctgagagtttgagtggtgcaaacacacacttggctccaactaatggcctcatctgtctgctacagttgtctatgtattgactttcctataattatagtcttctgtctctacctatgccaattactcttatctgtagaaatggatattgctttacagtgtatacagaattacattgaagccattccagaaagtttacaaagcacaccaagaaagaaagcaggaatccctatcccaagctggtaggaaaggcatagtcatgcatcttgttccctgtgtaacataaagtcttaatgtatgccaaccttagacagggttaatctggtgtcatgataaactaataccaaataggccactttgtaattttatctaaaaacaagcaaggtcaccatgtgctaaatgttaccatctccagctagtgggtaatagctactctttcatcagtctaggacagcactcgccttccctaggtcacccaggctgtctcacagccctcttgaaacagttgtggctcctcatggctccttgctactgtgagtaatgacagcagtggggatgttcctgaaggtcggccaaggtattggcaatagtaaatggatgtccctatttcttctcttaccacccaaactcatctagtaaaagaatataaaggtaactggctctggaaaattctgtgcttttcaagcaggacactgaggtctttgtcctgagtggcatgaaggaccccaagttcctgagtctggaattgatatatgttgtattactgcgtgactttgagcaagttacttagcctaatgaaatttgaatgtcctcttttaaatgagaataaccatggttaccttcaaagatttgttaagatcaggtagaagagatgtgctgtgcatttggtgcctgcaccagttcctggaagattagtaaatctcttggtatcctttccatggagaagcagaactgccaaatcaaattacagaaagcccaggtgttctccattttatctggcaaactattttccaaagtctttgatgccagagttacatatggacaccaaagctcaccagacatgctacaacataaaacaagaagtactatcaccaaacccacacacattagttatacttaaaatctaatcacaatatgaaggagatgagaaaaggcaggccctgaaatccatggaggagcagaaatgacatttccatataggaagttattccaatggaaaaatcagcctctgaatctacactaccaaataaattacacactggaacacagagtgtgaaataatccagttttcttgatgcaagttctcactgtagagcccatgtggcttcatacttgtgatattcctgcctctacttcctgtatttgtatctttttgaacatcataagtaaaaaggtgttcatccaacccaatgttttcatttgtgttttcaaggagaagacttcccctcaggatcagataaaccgacatctgacaaggccgcccccagactacaaagaccaaagaagaaattcaagcagcctgcagccagctactcagtattctggtaagagttcttcaaaactaatacaaatcacaactgtgaaaaaagagaaacaaatccatttctactgttttctctccccaccttgcatagtacatcatcccaaagctttcactaacttgacttaacagtcagatccaaacacattcagatctgcattatggctcacaatataatcccagcactcctgaggcaggaggagcactgcaagttcaagtccagcctgagatacacagtaaattccaggctagcccagattatagtgtgagatcctgtctttaacccttcatcctcaaaaagacacatgagtcctttcatgtgtccttgcttgtccatcatgctctatgctcaagtgttccctactcttctcacatgctccctactctcttcatgtgctccctactctcctcacgtgttccctactctgctcctcacgtgttcactactctcctcacgtgttcactactctcctcacatgttcactactctcctcacatgttccctattctcctcaggtgttcactactctcctcgctctgtgctcacatgttaattattctgccaattacttgtgagcacatgttccctattctcctcagatgttcactactctcctcaggtgtttactactctcctcacgtgttcactactctcctcacgtgctccctattctcctcagatgttcactactctcctcacgtgttcacaactctcctcacatgttccctattctcctcaggtgttcactactctcctcaggtgttcactactctcctcaggtgttcactactctccttgctctgtgctcacatgttaattattctgccaattacttgtgagaattttaaaaccctgaagattttctaacttctgtgttcactcaccctcctcatgttgaccttggcccaggcagtggaaggttacatagaaatagctctttttagaacatcacctggcagcttgcatacaacctcatcattcctcattctacctctgagtccatcttcccaagtattctccttgaaagacaaatcaccttgtcaaaaaggaaaaattaaaaagcaaatcatattttataaaacctttctaaacaaaaaggaacgatttatatttcttttctatgcaagacgcaaaacagagctttttactcactgtcattctcatgaaatagggcaggtccttgtagtaaaacctctcttcagaagttctctgaatcccaaagaatcttcctcaaatccagcccatgctgttcctgctccctcatttccagaaatttctccagtcacgtctgtccagaactctgattttcttatcacattaagctagtatcttcagtttctcaacttccttttctttacatgtttccatctgaccaagaagtcatcaagaatattctctaaaaagcaggatctatggacactcctattgctgtctcctgtcctgttgcaaaaatactttaataggttgtggtaattctttcaaatgcctgaaaatacaacaggttatctctccactgaaattaaaaatgggaatatgtattccgatgctttttttttttaagtgcagacaatttttttttaagtgcagaaactgagatctcatttcagtttggttgtcctcaaagacaggggagctctggtgaggagcacggcctcatgccataggcaaccaacaggctctagagaaccagcaagccttttcaatagtgtacaagttttcaggtaggtgtttaaggtttcctttcccattcttgtagaagaatctctgggatgggagtccagaacagattgctatctgcacagtgtcaccagagtctaggcttctttttgtttccttaacatgtggctcccatcccaagggctgccctgcagccccacatcaggagcttccatgtccaaattccaggcagggagaggaaagggggaaaggtaagaagcctcctggaggagccatgtcccctcataaagcagtcttctgggactcttgcccactcatctttacctctagccacaatgtgtttttgtggattttccatcagcaagaaaacccaagatttgcgctttgtcacatgaacacattgctgtaaacactgaggctctgattcagaggaagacagggacaggacaatgacacccacccaatagttccttccaaataaaatgtgggcatttcctgagaaaagtctttgcatactgctgccaccccaagtgggtaagagtcactgctctggggcatttgacttcatgtgcctcctgagaataaaacaaacaataacaaaacaaaacaaactctttcatgttgctttaatttttaatatcagtccagaaataattcttttgttggggagggggatcaagcccagggtcttccttgtgttgggcaagcattttcccagtgagcaacatctctagcattaaaacttcttatgtaccctacagagtagagcatcttgtataaagaggtacaagagactcctcccaccttggggagcatatggtctagttgagggtgtgttttgtagtaaagagaaaagctaaggagttggcttggccttgtcttttgagttacacatcataccagcagggggtctcctaagaagtcacttgtgggcatgctcttcacatacctcttattttgtgtgtgtgtgtgtgtgtgtgtgtgtgtgtgtgtgtgtgtgtttgtgtttgtgtgcctgtttcaatatcttcatgatttctctgggttttgtctttccttcaatctccttcattaaataattcaaaattcagttgaaccccaactctgtcagctgctagacctggaatacaactataaacaaaacaagggaaaatgccctggtggaatttgtcatctaaggtacccctttccctccatttttgcctctcaagctgatttctcagggtgacttcagccttcctgagccagggatatttcagtgcatctattagtcactgtctgttgtatggagccatcttattcagcagcctggggcccagttattgccccccccattcaatcaattgttgacaggcatcaagtttaactggcagcgcttctgatgtccgtggactacctcggtgctcagtggaagaatcaaacagaaaatggcctccaaagaaatgagattaggatattaggaaaagcttgaaaatagagcttcagagttgatctgaatcctgaagaaaatgtaagactcaaggggctaaggaatatcacaggagtaggagacagataagcaaagaaggctggtggggtattcaatagcagtgcagtagtgggtgtgcacccaccagcaggcttctcgtatggaaataatcaccagaacccagattacatcaaattcccgattcttaaagagatgagactttgtttgccctttggatgcagggaagccacccatagcagcttcttgaatgaggatgatgcagataaagaatgagagatgattttccagggcacaggttccgagtagtagtgtagtggccatgaataggatttatcccccactttctcatttggaccctggggtggagagtaacctggatttcatgacagctagctaatcaaagttgtagtctttgaacttggaacacaacaaaagtaattcaaaatgaaagattatcacctcaatgacttcaggagacaaataaaataaaaactagaaaataaaaccattctatttcagtcttctttctgtaatgtgcaaactcttaaccaagaaacagtggcctagggagatgttctctcccaggtgtcttctgttctttttgcctggtgtgtttcatatgttatttgtctaatgataagttcttgcaagctgagacaggagatgccatactatcatgaacaaatgtgattctcttctctgtcctaggtggctcctctaccgtgaatttaaactctaaccaagctttgacaaatccagtttcaacacccaccattttagctccaaactccagtctcatgtctacatctcatgggatgagaatgccactgttatccacagcagttcagaacatgggggtgtatggaaacctgccttgtaaccagcctggcacctacaacgtcacttcagcaatgaatcagctgacccaacagagaaatacaacccaactgataacaaatcagaacaaccctctgatgccacggccatctcccttaggggcaaataatggtaacaatgtggccacctttggagctggatctgttggcagttcacaacaactgagaccaaatctggctcacagtttggcaggcatgccagcccagaggtcatcaactgttatgatcacatccaacacgacagcaacaaactgggcttctcaagatgtaacggcgaaacaacaggaagccctcaaatccacaggtgtacgcttcccaacaggtactcctgcaacctataccccaaaccagtcattgcagccaggagtggggagccagccattttcccagagggcagtggcgccccctaaccagctaacgccaacggtgcaaatgagacctatgaaccaaatgaatcagacattaaatgggcaaacgatagctccactcaggggtttgaacctcagacctaaccagatgagctcacagagtctatctaatatgaatccatcaggaacaggattgaatcagcctcggacaggcaccaaccagccaccatccctgacgcccaacacttttccttcatccaaccaaagttccagggcttttcaaggaactgaccacggcagcgatttagcttttgacttcctcagccaacagactgacagcatgggccctgccctcaacagcgatgctgatttcatcgattctttattgaagacagagcctggcaatgacgattggatgaaagacatcaaccttgatgaaatcctgggaagcaattcctaaggagaataggaaggcgctttgcaggcttcaagcagtattttctaaggacacagtaatgctaaactgctgacatcggtgaactacagacatcaaaacggaaagctggcagtaaccacggtgacaaacattctggttcacgtgcttgttttaaaaatctcgagcctgatattaaaacattgggatcgcttttccctgcctgaacatcaggacgtgttatccagtttatccaaacacaactgtgatgttgatgtgtaattagttatgtataatggtcttcccaacttccttttctcggtgaaggaaatgtaatggaacttgagacttgtttcaatcccatatcatagtcaggcagagactggcatctgctctagtagataagtatgctttgatttctccactatctttctatttccttttcctaaaacttgcaggaaagactgaaatgttatatggttgtttggagtaagtaagagagaaccagagaacctagaagccattcagcagattatatgatttctttcctagacacactgctcctcagttttgtaattttcccatgtgttttgtattttggtaggatgctatgtcttgtgataaaacaggaatgcagggcttacaacttgaatagggcttccctaccaatttttatagataaccaagacgtgtcgtgatcgcactgaaatatcagtgcacaaccgactgcataaaatttcacttcaaaaaaaatttgaatcttgccatgtagaagacaaacatggccacaaataacccaaggtgtttccagctgtgattgatgctactagtttgttcccaagcagaatgcaattgagccttgtcctcctcttttttttttttttttttttttttttgtagccttgagacttgtttgtagaaaatgaaagtttgggttagagtgaaattagagagcatcctgttttgactggagataagaaacaggaggatagctgagagataatagggtcttcctgggacatagtgcttggacttggatggacagctgagcccagtgtggtctgtatgtagccaccacttactctattcgtgatacaagtaaaccattggcctgtggtgcctgagccttcttatccaggtttctcctcagggctgagtgtgtggcaaagcatggatttttgttgggtcactgcagctcagtgcccacatctatgtacactgcaaagtggaggagatgtataggttcgagttcgttctgaaatgccactaccactgtcctaaattcagagaatcaaaggctactctcaaccttcaagttatacattcacatacttcactgtcaggtgtgacatacccaagtcactgaaacatcaaatcttcacaaatctgttcggaaaaggaacaagtttttaaagctctgtaaagccctcttctggtctttacaacgcctttgggctctctccttcttttccaccacaccaatatcgctggcccagaatctttcctgcgctgatttgtaaatattaataaattacttgttttgtaaacttttgtaaagaatattttggtagaaatacttaaaacatattctttggattatatttatacatatgtgaaataaatatactatcgaaaggttatattttatacaaaaagtaaattgttaccttttgtatgctaatatacaaagttttgtataatatgatggtttatttttagctctacacttaaaccgtaggtgatggagtggaaacttttaaaaactaccaagaggcttgttagacgaatttgtattctgaacctccatatgaaagcattccaggtttccagccttccctgttgttggtgtgttttccagctctaaattctttattaagcccatagttcttgtgtcttatttgattattctgctgtgcatattgtatcagtccctgtaataggcgttctactgagtgttttcccattatacaaaacaatgtttttccatgcagaaagagaggaaacacaattgtgtgtataatcacattggttttgtggctccttcagattactgtacatagctgcaggatttctcagttgcagcacctgtaattcagtttgttttcaccctaacacaaatagtacattttgtaacagctgtccagctgttcaattgaagaggcaaagcaaacagaatggccagtttttcttctattttaatgtgaatttcataagtaatggctatttattcagctattcattaaaatacaggattctttggggaggatggtgtaatctatagtttctgtttgttggcagcctattaccaaagatgacgtaattttcctgaaagctgagataatgacaatttgatagacaaacatagtaagagcctcaggatttacaacgtaagagctattgggatacaagcacccatttatagaaaggccagactacttaatcgctgacattgcttatcattctgacatataacagagaaggtaggagtcatttcgctttctttatttaaattcagagacaagaaagtaatgtaggcaaataattccttcttggctttgtgttcagcccaatgaatgagtcaccaagtgaagtgctggtgttacctgcattgctgtcctgaatccacaaatgtaaagatttcaatttgtaatacaagtattttgtattgtatgcaattccatgtgtaaaaaaaatagttaaaaaattcagaagtggttttcttgtatgaagtcatactgtcagtcaccaatgatatcattacagcattacagttagaataaccaatgttaataggaatggctacatatacacaaattattcttttttaaagatttattttgtactttttaattatgtgtatgagtgtggatatgcatgtgtgagtgctagtgcctgccagggctagaggatgccctagagatggagtcatgagccaactgatgtaggacctgaacccaggtcctctgaaagagcagtgagtaccactctaaaggtgctgagccatctctccagcccccatggaattgtactgtgcatggagcttagtagtaaaatgcagagtcctctcttttcagtgttgttccatctacttagaaagatcatattttatatgcttgaaattttacatgcaggacttggaagatagataagtcaagttgactgtggcaaaaggatgaggacatttcagtcctcaacactcatgtaaaaagctgggtgtggtggtacatgccactgatactagctctgaggaggcagaggcagccaacctagcctaattggtgtgctccaggccaatgaggaatcctgtcttagaaaaagtgaatatcttaggtcatcatctggcttacataccacacatgtcaacatgtatacacacacacacacacacacacacacacacacacacacacatatgcaagtacacatacacactcatacactaaaattaaatgataaaattttaaatgcataatacccactaaatgctgagaatacactgattaatttttaggcactgtggtcacttgtctggcctgatatgtggcatttggtatgaacacatctcagtaaacacacttgactgtatatggtacacagctttctgcagaacctaggtggctaagaaaaactgaactaccctcagttctcttgccctgctaattatactggtaggggtccaagtatatgatacaagtatttttactagctctatcaatggaaccatagtgaaactggtattttatgtggccttgtcccaaagaatctggaagactgggtggaaaacaaaattgtcaccaataagaatgaataatagtcatctagtggtatatgactttaatcccagcactcggggggggggggggcagaggcaggtgtatttctgtgagttcgaggccagcctggtctacagagtgagttccaagacagccagggctacatagtgagaccctgcttcaaaaaatagcatcagcttacatgaggagaaagagaaatatacaccattcagaacttctcactgacctccagtcagccttagaagagcatctaaagagaaaatgggagtgggaatgggagggcagtaacagacagaagactcttcttgtgatgttgtccacagtggccactgtatatttatgtgactgcgtttcatcacccaagaaagttggcatggttgaaattgaaacaaaacatccctactctagaactctgtggcttgttatttcacaaaactaaaagagtccactgaaaagtctcaggagcatcctttttaagatgaagaaatcatttgtcattcaacttcatgcaacatggcaaccgtctcctttaaggttgaatcataggcaagaacgcatcacatggaggccagattgaggccccatacaaacaggaaggctgtgctgaaggcttctcccctgaacaaggatgtgttaaccttacccaaactatgtgggctgacaataagagaaagttgaactcacaaaggaagatcaaaaaactatgcacctcacaaatgtttactctttttggctgtcttttccattcacaccttcccagacaattccaatttttaaatctcactgataatcttggcagcactgcctccttcagaatgcacagggaggccttctaaatcttatctgtttgccacatccgcctcccagttcatcacatctgggtgaggaggcaaagtcttctgccaggctgagatgaacctgtgcccaaaagatgtctgaacacacagtgcaaccagcaggcatgagggtgtggtttgaatgagatgtccaccatattcttaggcactgaacacctggacctcagctgctggcactgtttgggggaggtttaggaggtgtggccttgctggaagaagtgcatcactgaggacaggcgttgaggttaaagggtctccacttccagttttctgtctctgcttcaagctcatggttgaggatgtgagctttcagtatactgctaccgtgtctgctgcttgctgccatgcttccccgctgtgtccactggaatcatacactgaaataaactttcttcaatgaggtgccttggtcatggtgtcttatcacagcaacatagaagtagctaatacagatgagaggttaacatgcattggccacatctccctgagccttcaaatcaacagccaggaaagggaaatattgaccccccatctccctgccaccatatgtctaggatgcatggcagctacatttttccagtgggaattactgtctccttatgttactgtcaccacactggattctgtatttggggtggccagggagccagtgttctctgcagtctcactcatcttctggcagaattcccatttctctgacttagtgcactaaccttcagcttgagactcagtcagcacccaactttttttttttttttgaagttctattacgggaaacaaaatcccttcaatgtttcaaaggggcagagagattttaatataagaagttgggtactcaggtgaccggcaagttggaaagccacagtagggagggctacccagacatagcacaaggaagaagccatcacaatccccaaggcagaagggcacaaagattggaatggagttcagttggtagagtacttgcctagctgcatggagccccgagtttgctcaccagaactggaaggcagaggtagggagatccagagtttaacatcatcctcagctgcaaagccagtgctagttcaggaagaatccaagatccctagagaagatgctacatcatcagctggcctgccaggagaagctgggcccaaggaggaggtctccactactaatagacatgtcactgatgacagatgaggagaagaagcaatgtcacctccattctatccaggaatgagcctgcctggatgcagggctgggttcagcatgaggagcctgcagactctggttgtcaagtaatattacagacctatagcaaaacctagatttttcagcaaaacatactgagtaaactcctcctgtgcttttgaatatatcagttcatctcaatctgtttattataaaatgataccacctaggaaaagccagttgtgagtacatgaccctacacatacatataatggttccaagaagtgcatttgccatttcactgactccaagaagacatgtttcccatgtgtattctacagagccagtcatcatgtctagcccatgtgagagaaagcaccatgttattgtatcatgtcagctctttttcattcttagcgggaggtagtctagtagaacaatgatgaatttacagtaagcagcatctttgatttagtgacatgcatattggtttgatgcattcttggggatgatcctgactcactgtagtgttcacgcaatgctgtcagagagcaggtattatctgccatgaggatgtttcaggagcattttcctccttcttgtcaccttatggtgacaacatggttgttccacttctggtctacattccaatccagaaaagagaggaaaaggaaaaactatgaacagcaaaacaaatttgttgtctctgccttttcatttggaaaagacagccaacccagagacctcttcagcaacagctgttttgtggccttttgggtctttgggacaggctgcatggcaagtatttagtcatttcctctctagtatagggtgacaaggggctggtggttgtaaatgaaagtataaagacacaatggggatgagaagcataagctcagtacttactgtctgtgagagaatacagagcagagcaatgaagacagcacatgcagagccctgcagcagaacccggttctgccttcccactggatgaagactgctctgctggtgtacttatgcctttgtgtattatgaggaatgagaacaaagctgagccaaatgcttctaaacccttgctatagcagtctgctgtgaataaagagttattaacttaaacatgcaacaacacgaagatgatagatcacaaaagcagtttctaatagaaataattaaaatgctagatttaaaaataaaacttactgaaaatctatagatgcaaagatagtattgtactgcatataaacccatggtcagaaataaaacccaggttatggccaactgacctctgatagagcactaaggcaattcaacagaaccaaaacagtctggaaaatagtttctggatgtttcttaggaaagagaaaatgtcctaagatggcaaaggttgcaaaactctgaaaaatactcaaaatcactgaattatattttttaagatggagtctttcactgggactaggtctcctattagactggctgacccatgagccccagggatcctcctgtctctgcctccccaataccatagttagagatgtccatactgagtttggctttttaagtgggtgcatgggtggaacttggattcttgagtactttacccactgaactatctcataaattttatgatctatgattcatagctcaatgaagttgttctaaaaaagaaaaatgtttctgttaatacagacactgaaataaaaaacatggcatgcccaggggtgaggtgaatcctggagtgtgtgacaagccagtgtgggtgatggttcttactgactgttgggttgggaagccttgaacttgtactatggcaaccgcacaggtgacaatgtgtaggatatacccaggagggcttgctccagacagtaagtataatactaagacccccatggaaacctgacaccattacattaaaaacagaatagggctgctgttccgcaggaccccatcccagaacagtgaaaatgaaataagtccttggcatcacacaggggaaacccctcccttgaagccatgtgataacaagacattattcatgagtctgagactgtgttctttcagtgggctgtcctgcagctggggagagggaagcagggagagaagagggagggaaggaagggagggagtgagagagggagggagggagagaaaaaggcatgaagctgggagggagggtagaagtggctctgggaggagttgggggaggactgaatgatgaatatgatcaaaatacattgtatatatacatacaatctcaaagaagaaaatatatattaaaaaaatgtatgtgtccaaaagaagaatcctgaatgaattttgtatgtaatatatatgaaaattcatgaatgaatattgtatgtgaagcgtcccctgaagtagaaaggagtactaatattcctcacaggctcagaaattcctacaaagcttcaaagataaccattatcaagtcccttatcaaaaatcctcaagcacagggtgcataccagaaagccctccgggtccctcatggtgaaaactggagctgggaaacacacacccctgccgccataccaatgcccagtggcacacctgctgtcctcgacagaccacccagactcctgcagttgaaactcacatgctggcttgtggttgcttccaccacacttccttcaacctccggctccagagcagcaagcatatcgccacctgctggggagaagagctcaaaagtcagcacaagactctcctagagttcagagcctatcctgaaggccctttatagagatggggctcacagacagaggacctagactggtggccacattaggtagggagatctgtaccctcctctggagactgcagccttcggcatcgtctcaggtacttccagctcagcgtcagcctttgtggcccaaggactgtctccaacatttatcttccaacttaaagaggctcctccctcggccagcaatacaaccaagctatctggtggttactgtgtagcaaccagccacaagctctcagggtgggttaactacggccctcaataaacaaaactgtatcatgacctgagcccagcaagggcagcacagtggtaggcctggccgcaggatcccggtgttgtgaatggcctgttgctgagaggaactcatggcccaagatagggacaactgatcctagcaggaaaaaggatcagcaggagctgctgcggctcagtaggagagtgttggcctagcatatgctggctgatttcaatccccagtgtgaagaaggaaaatgatgagaagggtcacaaagaaaggaaaacacgttgaagagacatgattctattcgcaatagccaagaatttgaaggaggaggaagagtaagagaatgagaatagaaggatgaaggggaaggaggaagggagagaaaaattaaaaagaatccatgtacagacctcctgttctcatgggctaaaataagcaattttgtttaaaaaaaacaaaaaaaaaacaaacaaacaaacaaaaaaaacatactgcccaaagtgacttacagatttaatgtagctcccatcagaatggaaagtttatatggaatcatgaaaaactcccaaaatgccaagcaatttgaggcaaaaagaacaaagcaaggatcattatactgtttaactttaaaacattctgcaaatatctataatcaaaatggcatggtactgacataaaaacagagacaggctggtggaacaaacaagagttcccagaatcccagaagcaatcccacacatctacaaccagtcaaccagacaactttttcagtgatacatttgtagaaacatgggtgagataaagaatatatatgttttttgagatagagttcctctgtgggtagtcctgggtgtcctgaaacccactctgtagaccaggttggcctcaaactcacagagaattccccttgcctctgcctcctgagtgctggaattaaaggcacatgccaccactacccagcaaacattctttttaataaacactgttgagtaaattgcatgtccactgcagagtattcaaactagagacatagttctcaccaattaaaaagaaatcagttaatgtgggtcaaagaattgaagctatgtgatatatagaagaaaatataggagaaatgtttcatgacatggtgatggacacatacatttggggacaatgttcctaaagcatagacatggatgactgtgttgaacaagagagcctccaggcagcaaaggagatagtccacagagggtgacagcctgtagaacgggaggaaagatggcacactatatacccaacaacaaattgatatccagactatataaagaaccacaaaagctcaatatcaagaaataaagtaaaaacccaaatttaaaataggaaaggattttaagtggataatttaaagtgggtaacagctccagccgagcatgggtgagagcaggctccctgggtactgtgggcaagtgggctccagctgaccgtgggtgagcgagctccagctgactgtggtgatgtgggtaaacaggctccagctgccatacacagggacaggtcccctgctacgccttctctgcagcgaaggactaaacatcttttttgtttgtttgttttgtttttttgagacagtgtttctctgtggctttggaggctgtcctggaactagctcttggagaccaggctggtcttgaactcacagagatccgcctgcctctgcctcccgagttctgggactaaaggcgtgcaccaccaccgcctgcagactacacctcttgaaccacagccaacggtaaccttttctcctttgagttgcttcttgtcaggcatttgtcatagcaacttacacagtgtgctcagccatgtcatattattccttagattgtacatatacgctgtgtatgtttgacatacttcacaatgaacttacacagggtgctcggccatgtcatacattccttggattgtacatatacactgtgtatgtttgacatatttcaaaataaatcttttataaatactatcagatactattagatatgtggaaattggggcaagagattgcaataaattaatatcataatcactaaagatttttcactcagatggctttaaagtgtcttcattaattttaataaaaaccagtgtttgcacgggggagggcctgagccctatcccaaaggatatgacagactctgatggcccctatggaaggcctcaccctccctcgggagcagaaaggatatgagataggtagggttttagttggggggaggggtggtaggggtagaggggagggagagggaactgggattgacatgtaaaacaatctgtttctaattcaaatttaaaaagagaaatataaaaaaaagtgtttgaagtaatagaaaatatgttacatagtagttcacccaagaaagaatcagagagtaaagccatagctgaaagctcccagcctcaggagtcacaacaactgtgaataatgacacttaatgagctctgaacaaaaaagagagttttaaatccaaacattttgggtcatatgaatttatttttatacaatgcatgtatacacataagtaattttattctccctccattttatttttatttattagattaactagctattacttctgttcatatcacataagagataggagaggatgtgttttatcaaatattaagctgactaaagtttgcatatagctttgaaatatctgcaaacagaaaatgacatttgcacatagtcccaggaataaaaggttggaatggtgtggaggctacatgtttataaaagtagattttctctattaagtattaagaaaggttatatggaacatgaatgaatgtaacattaaattatcttcaaggctgtgtttgcttattacttgtcctatagtaactttaaagcaatgtgttgcctccaagcattttagcatcagaaagtagagcagagagtgaggagtaccactttgtatgtgatgtgtgtctgtaacctcttgtataattctgacttttgtcatttcttgggaccatagaagattactctccacgtggtctttcggttgaagttatcagggcattttccttgatctttgagatggtcagtggctagaagaatgtttgtaattctgctaggagagtggcaaaactgatatatttgttcatcttatgaaaccaaatgccagtggtgtttgtgaggattagattttgaaaattcaagttagataaccactttattatggaaaaatattccatatcttatttctaatccagaaactatatgaagagagtagcactgtagctacatcacaatgcagtttcaagtactggaaatgagagggtgggcagaagacactcagctgtgcaagggcagggtgagtgagtttgaatgatacatggctatggtgatgagagttaagactgtccccaaaaactcatttcaaagcctgtcccttcagcatttcaaaggtagtggatgatatctggaaagggaattttatttcctgtaaatctaataataacagggtgttaaggctaaataacaggcatataaaataatgtgcatcagtgtgttctccacactaactgtgcacagatgtcccaggacgaggtcttctctcctgtcagcatagttttcatttctaaggacatcattcacactgccattaagtcatttgcctctcattagtgaacacagataaaattatctcccaaagggtttaggtccctaaggttggctgacaccagaagtgagttatgaaacaaatacatgtgtatttattttcttctatttcaaatgctcagaacatcttaaggtgtatttcacctcagaaaagcatgctcaaacaatgttaagtttgtaagttaaaatttgtagtatatatctatcgctcagtgttgctcttgctgatagtaagttttaatttgtgtatgtttacctttccttttcctggagtatacttgacatttgttatcattgtatatagttttgcattagacttaaagccttcttctctaaaagggaaattgcagtggtcttgccttgaacctgtaatggtagccacacaccccttgggcatggcctcaggccatggaagtggaaagagggaagcttcaggtgtggctttcttttgctaggtcctctggcataggtcagccgatcaggtaggaaggtcagagaaacactcctgccgttctttgtatttttctgtgtaagcgtttcccaataaacacccatttatcttgggtctagtgaattcattacaccaacgccttcaaaaatgcatggtactttgttcagaaagtccaattctttaaagattcatttagttctaatgatgtttcttttctggaggttccttgatgaattcctcccagcagccacttagtgaagacatctgaacttcgccttggttaagacttcaagtcccaccatttgatgtcatttcagtgatgtgagggactgtgtttggggatttttctaacagaggaaacttatcttaaaatttaaattttctagttgatgtctgtggtacagttaggtaaacattgttttgtgggaactacaacacacacacacacacacacacacacacacacacacacacacacacacactgatgaacatgattctgccttccctttggttgttttttgttttgtttttttcttttggtttttcgagacagagcttctctatgtagctttgtaggccaggctggccttgaactcacagagatccacctgcctttgcctattaaaggtgtgcgccatcactgcctggcaaaaatcaggttttttaaaaaactaaaatgctgaacattaatgtatttgcaatgaaacattttatacctaaaaactaaaattgtactgatttgccttcaagatgaaagacccccgaagaggtactttcatagaaggagacccgtacccaggaatcagcgagaccacgaacttggatgcaaaaagcaagaggctttattggatacacgggtacccagggcgacttagcttctgtgaggccaagtgcgctgagcaaaggagaggggtccttatatagcaaaaagcacagtacagaagcgaaaagcatagtgcgggcgggcatgtcaccgagtgtgcgagagcgagagagggagctaatggacaggggtctttcaaagactacccacagactttccaaagcttgctttagttttcctgctgtgcttcagcgcagtagagcactccgcacaacactgggaacttctcaggtagtcaagtttttcatgagagggccaggatggggcaagtacttcactttctattttgggaggaagggctcaggcatgccttgaaaactgacatttaaaaagttgcatttgagacttagggcataagagagagggagggaggctggtgtctgttgaaagctgaaagaatctttgagagaaactgagggagggatgtaagagagaagttttctggacttctactttagtttgagatgtctcattagctttttaactgtgagtatggatttctttcctccttacaaaagagatcagttgcccagctctgctcccatgctcctcccacttttactcccacgtatgtatttgtatgtatgggtgtgttatgcaccacagcgtgcctggtgccctagggggtcaggagagcgtgtccggccccctgcaacttgacaaaggttgtgggaagttttagaggtatctacttgcatgtccctctgttacagcacctacactgtccaccaaggatacaacatgggcactattttacctatcaagtactattttattttttaagaatttatttatttatttatctatttacttgtgtgtgtgtgtgtgtgtgtgtgtgtgtgtgtgtgtgtgtgttttgcctatatatatgtatgtgcaccacatgtgtgcctggtgaccacagaggccaaagagggcatacataatatttcctaggactggagttaatgacaattatgatctgccatatgggtactggaatcgaacccaggtcccatggaaaagcatctagtgctcttaaccactgagccatttctccagcccctttctattatttttaactcatatcttctgtttccctagttgtaattatttttcctacattaatatttgttttttcattttatttcctaaaccccattttatcatgtagtctttttggtctcttgtatttttcttttatattgcttaagaagaatcttaacaatcatttagcttgcatgatctttttattcacaaatatatcatcaactatttgcttcttctgctcttgaagcttgataggtgcttgacagcagtatgagcagaaacagagggcagtcctcatcctaagtagccaaagctgcttagatttttctttctcatttctctagttcactcttccatcttcccttagaagattttagtcttcattgtatctaaagttgaaattgtttgagcttacagatatctatgggaaatctatttgagcagtataaaaggtgtttcatgttaagtagacacataactaagtagcactcatctctagtattcttagaacaactaatgcgacattctgtgtgacagctgctattggaagcatgtggcatgttccatgtcatttactctccagagactttatgagacaaatatcccaccttttgtgcagaagcacatactgagacattttttgagacattttttggtgccgtacgtgcagtgaactcaagcttaatttcaatagccaactactatgtgatcttaaaaattcagtttaagttacaaagctacaacacattatgaactagacttttaaaatccttgtgtctacagagccaatcctgttggtggaactgtggtgagccagccctcaagttgtgagcatggttgaactgtccccattacttatctgtcatgtggcaacatgggagtgggagagatgccctccccaaccccatataccatcccacctcttaaccccccaccctcagcccatcaatccctgaggcaggtgagagagctgacacctgaggtcataggagtgggagagctctccttgcccctcatcagctgcagcactcaggagagtggcccctacaacacacctgagcaacacagtagagctggccctgaaagtgtaggtgtgggagagccgaccctgaggacatgaaagcaggagaactggccctaccccttatgcagtgttacaaggggtgaactagccaaggcaatgctagagagctgactgtggtggtgaaaggggagagctggtaggctgaccaaccttgcaactacccagggttattggttggcccactccaatatccaccccatttgtgatctgctggagcacaggaagggaccggacctacatacccaaagcccccatataaatatatagagatatattattaattatgaatgtttgacctttagcttatgtttgtcccactagctcttataactttaacctgttttcattcatctatgctttacctcaggacttcttacctttctttcattctgtatgtcctgctttcttgcttcctccatgtctgtctgtctgtctgttccttggcatctctttttctttcttttttcaagactaaattcctccctcattattggccattcagctttttattagacaaataaggtgccttaggcaggcaaggtaaaacagtaatacatctttacataattaaacaaatgcaatacatctttaaatagtcaaacagatattctgcagcataagcaaatgcaacacatctttacatagttaagcaaatgtaacacatctttgcatagttaaacaaatagtctacatttcccccttttgtttaaaaggaaggttttagctttaacatagtaagactatatacaataagaacaattatcaagtaagaattacatttacaatatccagtgcatttacatttagtaaattcagagaaaatactccattgtctatcctatcttggtgagtccaaagttgcatacctaatttactttagattctaatttgtattacctacaccaaattatctttttagacctcaaaacaatttctataagcatttatgtttctcaaccttataaactttacaactcttacataagtttcttttctaaatttggtaacaaggagaactatatataactcatcttcaactccatcagagacctgagaaggatgtaatattacctgagtaaacaggaagtacagagcaagcaacttccaaaactatagaaatgacagagacacctggattcctgggtggtcacccaaggttcctctgcaacactgggatatccattttcacccaactggcctagtgtgttctgtgaagcaggaattttgaaggactgctcccaccttgtcttggcaaagctcagcagcctttttcttttgtgtcctgcttgtcaagtttgtacagcatattctcagcagtcaaggcaagggcagtttcttgtccaaatggctagctttgacacaattaaagcaaactccatatggaggttcttcaatgcctatcatctttttatgaagtaaactggtgctaccaggagcagatgtgactcactgtcgtgaaaagccttaggttattaaacattttaaatgccatattctaaagcattgaagcaacttaagatcacctattgatctaaaatgtatctgtttaaccttgaaaacatacctagcatgaatgcatgtttggttgttatagatgactaactattaatcttcatttcttaattatcctaaacagtttgtaataatagctttcaaggactagaactttatattacatttttaaatgagctgcataggtacaataccttaagcaagagtagaaacatatatacatggtataaccaaagtaacattaaatttgcatcaatatatgaaaatccatactaatgtaaaatatttaagatgaatagttggctttttatcctatattcctatatctccactagtgatggtaaacatccataacccaccaaatgaccaaaaaccacccacagcacctcttgggaatgtgggtgttgtgttctctagactcttcctgttgtctaggggtgatggcatccccaggggatcctgagaaaattgaaatgctggtgacaacttgggaaaacaagctgtaacatttcttgtccagtctttgtgtaatgggaaagttcaaggcttatatgaagtcctggctagaatagtgtgtgagctggaccatgtcagttagtagccttgaagctattctggatgtagaactctgaggaaactgcaacaaaagcattctgagaggctggaccacctgggccacccattttcattggtgtctggtcccctttctctgaaaacacacaaactttcaaaggttaacatacatatctgcattaacacaagtatggactgtgtgttgtacacagcccaggaaaagataatttttaagcatgtaaaaacagactatagctctatagtagaacttgaagtcagagatgatgatgtcctcagatgatcctttgttgtacagggttgttttggttatcctgggttttatttcatatgaagttgaatattgttctttcaaggtctgtgaagaattgtgctgggatattgatgagcatagcatttaatttgtatattacttttggtaggattgtcatttttactatgttgatcctacttatccaagataataggagatctttccattttctagtatcttctttaatttctttctttaaaaaattaaagttattgtcatacaggtctttcacttgtttggttagagttaccccaagatattttaagttatttgtggctattgtaaagggtaatgtttctctgatttctttctcagcccatttatcatctgtatataggagggctactattttttttttagttaatcatgtatcctgctatattactgaaggtgcttatcagttgtaggagttctctgataggatttttggggtcacttatataaactatcatatcataggcaaatactgagagcttgacttcttcttttccaatttgtatccccttgaactccttttgttgtcttattgctttagctagaacttcaagtactatgttgaagtgatacagagagagtggacaaccttgtcttgttcctgatttcagtgggattgctttgagtttctccccatttagtttgactttggctgttgggttactgtatattgcctttattatgtttagatatgttccttgtatccccattctttccaagacctttatcatgaaggggtgttgaattttgtccaaggctttttcagtatctaatgatatacttatatttttttctttcagtttgtttatatggtagattacattgatagattttcatatgttgaaccatccatgcatctctgggataaatcctccttggtcatggtggatgatttttctgatgtgttcttggattccatttgccagtattttattgagtatttttccatctatgcccatgagggaaattagtctgtaattctatttcttagttgtgtctttgtgtggtttgggtatcagggtaactgaagcctcataaaaagagtttggcaatgttccttctgtttctattatgtgaaataatttgaggagtattggtattagttcttctttgaacatctggtataattctgtgcttaaaccatctgggcctgggtttgtttgtttttatttatttatttttggttgggagactattgataactgtttctatttttctatttccttggagtttataggtatatttaagttatttttctattctttatttaattttggtatgtggtacttatctagaaattagtccatctccttaaagttttccaattttgtggagtacaggtttttgaagtatgacctgttgattctctggattttctcagtgtctgttgttatgtccccttttcatttctgatttctctctctgtcttttggttagtttggataaacgtttgtctattttgttgaatttctcaaagaaccaactctttgtcttactgattctttgtattgttttgtttctattttatttatctcagccctcaatttgattatttcttgccacctactccttctgggtgagttttcttctttttgctctagtgctttcagttgtgctgttaattcactagtgtgagatttttttccccagcttctttatgtaggcatttagtgctatgaactttcctctcaggactgctttcattctgtcccataagtttgggtatgttgtgtggccattttcattattttttaggaagccttttatttcttccttgacctactggtggttcactgttcaatttccatgtgtttgtgggctttctgaaataaatgttgatgttgaattttaactttaagctgtggtcatccacaggatacaagtggttattccatttttttctgttgaggtttgatttgttatcaagtatgtggcctatttttgagaaggtttcatgaggtactgaaaagaaagtatattcttttgtgtttgggtgggatgttctatagatgtctgttaagtccatttgagtcataacatctgttagttcccttatctctctgttaagcttatgtctggcagacctgtccagtggtaagaatggagtgttgaagtctcccactattagtgtgtggggcttgatttgtgacttacaatttagtaatgtttcttttacaaaggcagaagctcttgtgtttggggcatagatgttcagaactgagatttcctcttgatggatttttcctgtgatgaatatgaaatgcccttctttacctttttttttgatttattttagtttgaagtctattttgttagctatcaggatacctacaccagcttgtttcttaggtccatttgactggaaaattttttccccaccctttactctgaggtaacatctgtctgtgagtttgaggtgtgtttcttacatgcagaagaaggatgggttctgtttttgtatccaatctattagcctgtgtctttttataggtgaattaagaccatttatattaatggatattaatgaccagtaattgctagttcctgttatttttgtttttgttggtggtgatggcattgtgtgttcaatcccattctttggtatttactgctgtaagatcatctatttcctgtgttctgatggacataggtgatatccttgggttggtgtttttcttctagtgctgtctgtagggctaggtttgtggataggtattgtttaaatttggttttatcatggaatatcttgttttctcaatctatagttattgaaaattttgctgggtaaagtagtctgggctggaatctgtggtcccttagagtctgcataatgtctgttcaggaccttctgaccttcattgtttctattgagaagtgaggtgtaattctgataggtctgtctttatatgttacctagcctttctcctttgcagctcttaatattctttctctctttctttctttctttctttctttctttctttctttctttctttcttccatccttccttccttcctttctttctttctttctttcttttttttttttttggtttttcaagacagggtttctctgtgtagctttggagcctatcctggcactcactctggagaccaggctggccttgaactcaccacctgtctctgtgtcccgagtgctgggattaaaggtgtgcaccaccaacgcctggcatattctgatgtttattgttttgattattatgtgacaaggggattttttggtctagtctatttttaagttggaaaagttttcttctatgattttgctgaatatatcttctgtgtctttgacttcttcttcttcttcttcttctatccctattatgattaggttcagtcttttcatggtgtcacagatttcctgcatttttgttgttgttgttgttgttgttaaggatttgttggatttagcattttcttttactgatgaatctaattcctctattgtatcttcaatgactgaaattctctcttccatctcttttattctgttgtttatacttgcatttgtggttccttatcatttacccagattttctatttccagaattccctcagtttgtgctttctttttctttttttaaatttaaattagaaacaacattgttttacatgtcaatccccgttcctctcctcccctgccctacctatccaataccatttctgctccccattgagagtgaggccttccatggggaggtcttcagagtatgtcatatcctttgggatagggcctaggccctcccctgtgtgtataggctgagggagaatccctctatgtcaaatgggatcccaaagtccattcctacgctagggataagtactgatctactacaagaggccccatatatctccgaggcctcctcactgacacccacatttatggagtctggatcagttccatgctggtttcccagtgatcagtctgggagccaagagttccctcttgctcagatcagctgtttctgtgggtttcaccagcctggtatggacccctttgcttatcagtcctctttctctgcaactggattccagttcagctcagtgtttagctgtgggtgtctgcttctacttccatcagctgctggatgaaggctctaggatggcatataagttagtcatcaatttcattaagtttgtgttttctttattgcctctatatcagatgtcaagtcttgaattgtttccttctcttgtttgattgcttttttcttggtttcctttaagggatttgttgatagtgttccaaatttttgtttttcttttcctccatttctttaagggaatatttcatttcctctttaagggcctcaatcatcctcattaagttatttgtaggtcattttcttctgcttcatctgtattgggatgttcaggtcttgctgttacagtgccactactttctagtggtgctgtattgctctttatattgttgagtatgttcttacctttttgtctacacatctcttcctctaatcagtataggtcgagcttgtgcttcagggggtctctctttctccaattgatatagttgggggctgtgactccattgactgttccttgagatgcaagccaagcagagcctcttgcaaatactcctcctggtggaagtgggcccaaggctcaagtggtcacttctttggtggaggtggggggttacagctccagtggacactcctcccattggcagcagagccatggctcctgtgattgctcctataagtgtaggtggggctgagggtccaatggtcaatgtagtagccaggtatctccaactgaggaatgtcagtgaatgctggctgggacacagctgttctttcccagagaaacttcttgtgagagtttctgcaagcaactgctggaaaccactgctgtatctttcctggtggtcattccctgctcctggcctgaggctcttgggtccctctgctgctgcttgcaggctggtgttcaggcctcccatgatgctgctccagtggtctctattaagtttgaaggaatctacagcctttcatttcctgtgaaagcaaaagcatgacctctcccccaaggcaatacatttttctgaattcaatttttttagcattatcaatcttttattcttgaccttttttaaagtaagacttggcaattagcactgatttagaaaagatttaagattcaaatgaagtggtcttcaatccttattctaccttatacaatgtcaagcatgttggttataatcacaacaaattgcaagcatttaactaagcacaaatgaaataattctccatagcatccaagctcaaatacccagttaatccttcataattatatctttgagcatcaaatttttatttcttttttattaactttttcattttttacatacccaccacagtttcccctcccttctctcctctccctgtctcccatctaccccctcctcatccactcctcctctgttgtctccatttagaaagaggtgggattcccgtgggcttgaagaaagcatggcccatcaaattatggcaggggcagtattgtagaggatgtggagtaaggggagaactcctcaactgctggtgggagtgcaaacttgtacagtcactttggaaataagtatgacagtttctctgaaaattcgaaatcaatttatctcaagatccagctataccactcttgggcatagacccaaagaatgctcaatcacaccacaaggacatttgcttaactatgttcatagcagcattattcataatagccagattctgaaaataacctagatgctcctcaaaccaaataatggataaagaaaatgtggtacatctacacaatagaatattacttagctataaaaaaacaataacctcatgaaatttacaggaaaatggatggagttagaaaaaactaattctgagtgaggtaacccaaacccagaaagacatacagggtatgtactcactcgtaagtagatattaggagtaaagtataggataaccaacttataatccatagtgccagaaaggctagataacaaggattcaaagagggattcatggatttccctaagaaggggaaatagaagagatctcctgggtaaactgggaggaggggtagggggattggaggataagaacatgagggatcatggggttgcacaggctgggcatgggaggcattggaggccaaacagaggggagattaacgaaagagatatcttcatgatggggccaattcagggctagagagaaacctggtgccagggaaacttccaggaatctacaaggatgacctcagctaagactcctaacaatagtggagagggtgcccgaaatggtcatctactgtaaacagattggtgactaactgtcatcagagagaacttaatccagtactgacggaagtagatgcagatatccacagccaagcactgggccaagctctgggagtccagtccaagaaagggtggagggattgtaggaacagaggggccaaggtgatgttgggaaaacccataaagacagctgatctgagcttatggactctggacttaggaagcctgcatggcactggcctaggccctctgcatgtatgtgacagttgtgtagcttggtctaactgtgaggcttctagcagtgagatcactacctgtccctggcttttgggaacctgttccccgtgctggattaactctcccagccttgaattcaattttaaagttaagatatccctaaagtttattctgtatatttggtgttttgattattatgtgtcggggcggggggaaggacttctttttgtagtccggtctgtttagtgtcctgtaagcttcttgtactttcataggcatatccttccataggttggggaagttttcttctatgattttgttgaatatgttttctgtacctttgagtagtgtttcttcaccttcttctacacctattattttggtctttttatggtgtcccatatttcctggatattttgtgttagggatttgttggacttgaggttttcttcggttgatgaatgtatatcctctagtgagtcttcaatagggggggttacagctccagtggacactcctcccattggcagcagagccatggctcctgtgattgctcctataagtgtaggtggggctgagggtccaagagcattgcctcattctgtgttttctttattgtatctatttcagctttcatgaactgtttcaagaacttccttcacttgcttggatgttttttcttgggtttctttagattctttaagagatttgtttatttcttgaattttttggtttgtcttttcctccatttcgtgtaatttttttgtttgctttttcttctatttctttaagggattttcttgtttcctctttaaaggtctctatcatcttgctgagataatttttnnnnnnnnnnnnnnnnnnnnnnnnnnnnnnnnnnnnnnnnnnnnnnnnnnnnnnnnnnnnnnnnnnnnnnnnnnnnnnnnnnnnnnnnnnnnnnnnnnnnnnnnnnnnnnnnnnnnnnnnnnnnnnnnnnnnnnnnnnnnnnnnnnnnnnnnnnnnnnnnnnnnnnnnnnnnnnnnnnnnnnnnnnnnnnnnnnnnnnnnnnnnnnnnnnnnnnnnnnnnnnnnnnnnnnnnnnnnnnnnnnnnnnnnnnnnnnnnnnnnnnnnnnnnnnnnnnnnnnnnnnnnnnnnnnnnnnnnnnnnnnnnnnnnnnnnnnnnnnggggtgtttccagattcagggagctcctccttgtctgtgtgtgtctaccccaagcaggcaggcacaggcctggggaggtcagggtgaatgatggtttggacggggactgggtaagggcagaggctcactcacctcgttcctgggtcggtctcatatctgggtccatcagcagaaagggaataaagagaaaatattaagaacagcaaaggaaaaaggccaagtaacatataaagacaaaccaatcagaatcacacccgacttctcagtggaaactctgaaagccagaaggtcttggatagataccctacaagcactaagggagcatggatgtaaacccagactactgtacccagtaaaactttcaatcactatagatggagaaaacaagatattccatgacaaaaacagatttaaacaatacatatccacaaatccagcactccatagcatccaagctcaaatacccagttaatccttcataattatatctttgagcatcaaatttttatttcttttttattaactttttcaactaattttaccaaacacaagaagaaacaggagggtgaaatccacacacaatgacaccaccaacaataaatccaaaacaaacaagaaccaacattcaatggacattaatatccctaaatgtcaatggtcttaacttacccataaaaataaaaagctataggctaacagaatggctgtggagacagaatccatccttctgctgtttacaagaaacacacctcaatttcaaacacaggtgatacctcatagtaaaaggatgggaaaagattttccaatcaaatgcgctcaagaaacaagctggtgtagcaatcctaatgtctaacaaattagactttaaactaaaatcaatcaaaagagatgaagaagggcatttcatactcatcacaggaaaagtcnnnnnnnnnnnnnnnnnnnnnnnnnnnnnnnnnnnnnnnnnnnnnnnnnnnnnnnnnnnnnnnnnnnnnnnnnnnnnnnnnnnnnnnnnnnnnnnnnnnnnnnnnnnnnnnnnnnnnnnnnnnnnnnnnnnnnnnnnnnnnnnnnnnnnnnnnnnnnnnnnnnnnnnnnnnnnnnnnnnnnnnnnnnnnnnnnnnnnnnnnnnnnnataaagaaacaaaggatctgacagaagttttgacccaactgggtttaacagatatctatagaacattccatccaaacacaaaagaatataccttcttctcagcaccacatggaaccttctcaaaaattgaccacatggttggcagcaaagcaaacctccacagttacaaaagaattgaaattaccctctgtatcttatcaccatgcattaaagctagaattcaacagcaatacaaattgcagaaaacctacatacgtgtggaaaatgaataacacccaattgcaccattcctgggttgaggaagaaataaaaaaagaaattaaagacttcctagaatttaatgagaatacccacaacatacccaaacttatgggacactctgaaagcagtgctaagaggaaagttcatagcactaagtgcccacatgaagaaactggaggaaagtcacattagagaattgacagaacaactgaaagttttagagcaaaaagaagcaaacacaccaaggagttgtagacaccaggaaataatcaacctgagagccgaaatcaacaaagtagaaactaggaaaacagtacnnnnnnnnnnnnnnnnnnnnnnnnnnnnnnnnnnnnnnnnnnnnnnnnnnnnnnnnnnnnnnnnnnnnnnnnnnnnnnnnnnnnnnnnnnnnnnnnnnnnnnnnnnnnnnnnnnnnnnnnnnnnnnnnnnnnnnnnnnnnnnnnnnnnnnnnnnnnnnnnnnnnnnnnnnnnnnnnnnnnnnnnnnnnnnnnnnnnnnnnnnnnnnnnnnnnnnnnnnnnnnnnnnnnnnnnnnnnnnnnnnnnnnnnnnnnnnnnnnnnnnnnnnnnnnnnnnnnnnnnnnnnnnnnnnnnnnnnnnnnnnnnnnnnnnnnnnnnnnnnnnnnnnnnnnnnnnnnnnnnnnnnnnnnnnnnnnnnnnnnnnnnnnnnnnnnnnnnnnnnnnnnnnnnnnnnnnnnnnnnnnnnnnnnnnnnnnnnnnnnnnnnnnnnnnnnnnnnnnnnnnnnnnnnnnnnnnnnnnnnnnnnnnnnnnnnnnnnnnnnnnnnnnnnnnnnnnnnnnnnnnnnnnnnnnnnnnnnnnnnnnnnnnnnnnnnnnnnnnnnnnnnnnnnnnnnnnnnnnnnnnnnnnnnnnnnnnnnnnnnnnnnnnnnnnnnnnnnnnnnnnnnnnnnnnnnnnnnnnnnnnnnnnnnnnnnnnnnnnnnnnnnnnnnnnnnnnnnnnnnnnnnnnnnnnnnnnnnnnnnnnnnnnnnnnnnnnnnnnnnnnnnnnnnnnnnnnnnnnnnnnnnnnnnnnnnnnnnnnnnnnnnnnnnnnnnnnnnnnnnnnnnnnnnnnnnnnnnnnnnnnnnnnnnnnnnnnnnnnnnnnnnnnnnnnnnnnnnnnnnnnnnnnnnnnnnnnnnnnnnnnnnnnnnnnnnnnnnnnnnnnnnnnnnnnnnnnnnnnnnnnnnnnnnnnnnnnnnnnnnnnnnnnnnnnnnnnnnnnnnnnnnnnnnnnnnnnnnnnnnnnnnnnnnnnnnnnnnnnnnnnnnnnnnnnnnnnnnnnnnnnnnnnnnnnnnnnnnnnnnnnnnnnnnnnnnnnnnnnnnnnnnnnnnnnnnnnnnnnnnnnnnnnnnnnnnnnnnnnnnnnnnnnnnnnnnnnnnnnnnnnnnnnnnnnnnnnnnnnnnnnnnnnnnnnnnnnnnnnnnnnnnnnnnnnnnnnnnnnnnnnnnnnnnnnnnnnnnnnnnnnnnnnnnnnnnnnnnnnnnnnnnnnnnnnnnnnnnnnnnnnnnnnnnnnnnnnnnnnnnnnnnnnnnnnnnnnnnnnnnnnnnnnnnnnnnnnnnnnnnnnnnnnnnnnnnnnnnnnnnnnnnnnnnnnnnnnnnnnnnnnnnnnnnnnnnnnnnnnnnnnnnnnnnnnnnnnnnnnnnnnnnnnnnnnnnnnnnnnnnnnnnnnnnnnnnnnnnnnnnnnnnnnnnnnnnnnnnnnnnnnnnnnnnnnnnnnnnnnnnnnnnnnnnnnnnnnnnnnnnnnnnnnnnnnnnnnnnnnnnnnnnnnnnnnnnnnnnnnnnnnnnnnnnnnnnnnnnnnnnnnnnnnnnnnnnnnnnnnnnnnnnnnnnnnnnnnnnnnnnnnnnnnnnnnnnnnnnnnnnnnnnnnnnnnnnnnnnnnnnnnnnnnnnnnnnnnnnnnnnnnnnnnnnnnnnnnnnnnnnnnnnnnnnnnnnnnnnnnnnnnnnnnnnnnnnnnnnnnnnnnnnnnnnnnnnnnnnnnnnnnnnnnnnnnnnnnnnnnnnnnnnnnnnnnnnnnnnnnnnnnnnnnnnnnnnnnnnnnnnnnnnnnnnnnnnnnnnnnnnnnnnnnnnnnnnnnnnnnnnnnnnnnnnnnnnnnnnnnnnnnnnnnnnnnnnnnnnnnnnnnnnnnnnnnnnnnnnnnnnnnnnnnnnnnnnctcaactttatatggaaaaataaaaaacccaggatagccaaaacaactctttacaataaaggatcttctggaggcatcaccatccccgacttcaagctctactatagagccatagttttgaaaacagcttggtattagcacaaaaatagacagatagaccaatggaatcaaattgaaaaccctgatactaacccatgcacctacgaataccttatttttgacaaatgtgctaaatctatacaatggaaaaaaagatagcatcttcaacaaatggtgctggcacagttggattcggacatgcagaagagtccagatagatccatacctgtcatcatgcacaaaacttaagtgcaaatggatcaaagatctcaccataaatccagccacactgaatcttctagaagagaaagtgggaattacccttgaacaaattggcacaggagaccgcttcctgaacattacgccagtagcacagacactgaggtctgcaattaataaatgggacctcctnnnnnnnnnnnnnnnnnnnnnnnnnnnnnnnnnnnnnnnnnnnnnnnnnnnnnnnnnnnnnnnnnnnnnnnnnnnnnnnnnnnnnnnnnnnnnnnnnnnnnnnnnnnnnnnnnnnnnnnnnnnnnnnnnnnnnnnnnnnnnnnnnnnnnnnnnnnnnnnnnnnnnnnnnnnnnnnnnnnnnnnnnnnnnnnnnnnnnnnnnnnnnnnnnnnnnnnnnnnnnnnnnnnnnnnnnnnnnnnnnnnnnnnnnnnnnnnnnnnnnnnnnnnnnnnnnnnnnnnnnnnnnnnnnnnnnnnnnnnnnnnnnnnnnnnnnnnnnnnnnnnnnnnnnnnnnnnnnnnnnnnnnnnnnnnnnnnnnnnnnnnnnnnnnnnnnnnnnnnnnnnnnnnnnnnnnnnnnnnnnnnnnnnnnnnnnnnnnnnnnnnnnnnnnnnnnnnnnnnnnnnnnnnnnnnnnnnnnnnnnnnnnnnnnnnnnnnnnnnnnnnnnnnnnnnnnnnnnnnnnnnnnaaaaagcaatggaatcttgaaattcgcaggcaaatggatggaactagaagaaaccatcctgagtgaggtaacccagtcacaaaaagacaaacatggtatgtactcactcatatatgaattttagacatagagcaaaggattaccagcctataatcctcttcaccaaagaaactaggaaacatgaaggactctaagggataaatgatccccagaaatgggaagtggtatgaactcctgaactaattgggagcatgagggtaggtgagagggagctgctacaataagagcaagagaagaggaatagaggagaggnnnnnnnnnnctgatccagacccctgaacatggatgtcaataaggaggactctgtactccagggagcctctggtggtggattagtatttttccctggtgcaagaagggactttgagagcccatcccagagtgaagggttacactctggccctggacacatggggaaggtcccaggaccagcaccggaagatttggtggactttgcagagcccccgttagggccctaccctgcctgggtggatggggtgaggggtaggttgggggtggtggaggagggatggggatgaggggagggagagggagaagggacttacatgtgaaacaagcttgttccctaactagaactaataaataaattaaaaaaaagatatccctaaagtatctaggcctgattaattcagcagttgcttttataccatgtctctcaacagctgccattcactcaccagcattcaaaaaattcaaagtcaacaagatatcatacaggatccagatgccttgtgtatttcccatctttgcatagcttgttctttttgtattactttactctttctttgaagactttacttagtcatttttaaactatttatttttcctatgactgtctatacccattttcttttctttcttaagtgcctatgcacactgaacctgtttaaaggtattttcagtctggacctgttttactatgcacctgtatcattctctgactatgtgagtcaaaccataaaaggctaagccacagctaggccttctgcctcctccttggaggcgttaagagtcaggccttaagtctgtgggcctggccaagagctgggagctattttactgcgagctatggctatctgaaaggtgcattaaaccaccccagctccagaaagttggtgcctacactgtcacaggcatttttacttatcttgctgtttctgcatagcatgttggctgcttacatgctctgctgtacagcagaacctcctaaagggctcacctcttaaaggagctgtatcctttgtttgtttttctttttcagccttctcaggcccaatgtggaaatttgggtctcacattgtatgccatttgacactgaaattttctttgggctgcaaagacacagacacttatgaatgctccgcccttagcttatgcttgtcccactagctcttataacttaatttaacctgtttctattattctacattttgcctacattcttttttttaacctttctttcattctgtatgtcctgctttcctactccctccatctctgactgtctggctgtttagctgacccttggtgtctccctgacatctctttttctttcttttttcaagcctaaattcctcctcctacttattatcccttctcagaagtcccaccttacctcctccctcattattggctgttcagctttttattagaccaatcaggtgttttaggcaggcaaggtaaaacagtgatacatctttatataattaaacaaatgcaacacatttattcatagttaaacaaatattctgtaacacattctccctttatgttaagatattttcatgaacattatcaaatcacaacaatttttaaatgtgtgctacatccatctattcattcatcttaatatcttgttgaactcctatctcacaccatggcctcttgtacatgtttggaaaacactggttggtaaagttgatagattacatacatcctgtacaattaaggaacataccattgcataatgaacaatagacaataatgtattgattatattatttttattttaattagaaagaaaattattttacatgccaatcccaggtccctctctctcccctcctcccctccccccaactaacaccctgcctatcccataccctttctgctccccaaggaggccttccttaggggggtcttcaaagtctgtcatattctttgagatagggcctaggccaacccccttgtgtctaggctcagggagtatccctccatgtgggatgggctcccaaagtccactcctatgctagagataagtactggtccactacaagaggccccatagatttccaaggtctcctcactccagacacccacattcagagggtctggatcagtctcatcctggtttcccagctatcagtctggggtccaagagctcccccttgttcaggtctgctgtttctgtgggtttcaccagcttggtcttgacccttttgctcatcagtcctccttctctgcaactggatttcagttcagttcaaggtttagctgtgggtgtctgcttcttcttccaccagctgctggatgaaggctatacgatggcatatgaattagtcatcaatcccattatcaggagagggcatttaaggtagcctctcctctgttgcttagattgttaattggtgtcatctttgaagctctccagacatttccctagtgcctgatttctctttaatattgattatattataagtagatgatacaaggtataagaaagacaaaagaaaataaaagaaatttgagtgcatgtaaagagtttaaatagtatatacaaagtagtcaagacgaaggagaaatctggttgcaattgttcttagaaaaagtatgtcaaattcattggctatggcaagaaagactgaagcaaaaataagctttatattattttgattgaattttatcttcaattctgaatgtttcaaactgatgtcagccttttgtgaagatacgtgtgtttttaatagcattcatctcaaaatgggaacttcatttaagttcaggaagaggtgactgctggtgtattcctattcattgtcatgggttggagcagacattcaaggcaattcacaccacataaatgtgaggcacattaggcagtgaatgttagttacttgggataggtaccaaagcttggcagttcatacaacactctccaagaaattcaatgacaatatatcaagatgtaatctcttccaggacaaattcatccttccccatatgccagcaatcttttatctgcttcccagtgcttggagcaatatatcaggaagtcacaagaaagtggtgaatgtgaaagtcattttaatgaatcaaaggaagacagcagcctgtgtacagcagtggagtttagtaatggggctcaaactgagacaaatcattttcttaatggaaaaatgactactgttcaattaaattatagtcatagaggccatatcacctgggaagatgaactgaatgaatttaaatcgagaaacagtttatctctaaaatatgtacatcataaaagaagaaaagactgtggggatagattttaagggttcttaaaaaaaatagccatggagatcttcagttagttccaaaaatgtagcaatgctcaatctgctgtcccttttcagtctcacccacactggtaggtctctcttaaagcaacagcagtgttagcatattagactcatgcttcttgccaggcattcaatgcttacatgggtcattttatttcatactcacatttgaacacatgcatgtttgcatttatgtgcacatgatttgaatagatgggaagagatgaaaaaaaccaccccaaaccccattattttatattatcaatatgtgctaattaaaagttttaaagaagtttggtgtggtgactcatgagtgtttgcaatcccaacaattgagagactgaggtcagaaagactgcaatgaatttgaagccagcctgggctttatagcaatctcctggccaacttgagctacaaaattggactttgtctcaaaacataaaaaaagagaaagaaaaagagaaagaaaggaagaaaacataaaatggatatttttaaaaagaaggaacactaactgcattcccacatttacagaagtcccagagaggataggtagtctaaatttactctgcaccaagaaactcaggactgctacctctgtggagccatttgctactcacgagaggtcactgcaatcactgctcttagaaattgttttattgtttataacaattcatacttgatttaattatatcagaatgttaagatagtacttatcccaattttccttatatatttcagtctatggtactgttgtagctgcagatttggggaagggtatgcagccaggatattctccaaacactagcccaatggtaaccatctggagaccctaggtcaaacaagatggaagtgggaactaacacccaaggtgatctccataacacatgaaggcacacacacacacacacacacacacacacacacacacacacacacacacacacacacgccatatttccttgcctatatttcctcctttgttccatgcatctttctttccttgctgtgttctatagatgactgcttactttcatcatgcaataatatcattagtcagtcccatctcattaggatgtcatgttgtcactctgatttatagacaaagggaacatcattcagagatacaaatcctgggacctaggatgtcctctttagtgactgtgtttttatctgtgtctagggtgattttattatggctggcagcatatatcttgtattgctaaagctgttatttggaatttgaagtagcaattgggtagtgcttatgaaggcagaatagctgaaggaatgacctatggtggatataataatgcatggtatccagtgtcttatgtattctttatgaaccttcagaggataaaagctgaaatacatttttcagacttctttgaatgtaggaatctagatgtgacttcagttgcatcagttagacacacacatgaccaagtgaggcaggacacctttttgctgtttggctttaactctgaaagtctgtttctccatccctacactgcagcttgttaatagaactgcatcagttctcatggcagcatcccaggtccccactttgctcatttaatcacgttgtgtatctttttcctatggtttcttttcttgtctgggtcatgctgtcctctgctgattcaaatctttacatcttatctctggttcttctgatggtaaaatcttaccttatggaaaacactatgtaagattggactacttattcaaattttttactgctccagtctatagagcatgattatattagatcttcctctcctggggtggaacatacttcttatgccagagtatgaatgaaatgatgaaggttctgtacacaaagaagttttaaaaactttgtttcattctgggctctcatatctccgtagtttcagtcaactgcactcagccattctgaagatatttcctggaaagttccagaaaggatacattttaaagggcatgccatcctgcctagctggtggaatctcaagctaccttttccctgtgcaagatgagaatcaaatcactgaatagtcataagaaaactagccatgtctcagatagggctacccctttgtttagtgtctcagaaagaagttgtatagagcataatcataggacatgtgcagctgccaactaattatagagagaagcaagtctttctcagcactcattctgggattcagggattgttatcacagtgtactgtagtaaagctcagtggtgtttcaattccttcctcactcccaggctaattcactgattattatctctgcctgtctctgtttatagacagacagatgaataggtagatggacagatggatgggtagacagacagataggagtttctagtctaggattgctttcaaatctctgtgtagctgaggatgacctttcttcttgtgatgatacatgatgctatcatgtccctataatgagatggaggtgagtgacattgtggtatagcggtgggccactatgtcagggtttcttatcacatggactaaagtactgacattacaacactctatctgaaaatggagatggttactaagtgactagacagtgatttgattcttatcttgcaaaggaagaaggtagcatgagattccattagctggccatatggcatgtcctttaaaaatgtatcctttctggaattttccaggtactatcttcagtatggttgagtacagttgcctgaaactatggagatatgagagcccagatttggagaagctattgtagataattaaaaggtcaatgtatgcttgctatttttaatgactatgtttatttgtcttgagagaagtacacatcactatccgtatgcttcccattcatagctcatcacaccaccatctcaaaagacacttatttcctcatttacatttaaatcatctattaaacagcctttggcaagacgtaacacacctatagatagagggtttttttgttttgttttgtttttttcaagacagggtttctctgtgtagctttggaacctatcctggcactcgctctgtagaccaggctggcctcgaactcacagagatccacctgcctctgcctcccgagtgctgggattaaaggcgagcaccaccaacgcctggcaatgcagtcatttttgaattatgactgataatcagtgtctataaccagaaaatgttgtcagttcattagaaaaagatgaaaacgtgaatttttcatggagtactgtatcacatacatctagaaagaaatttgaccttatatttttacatactcttcgtgttttaaacttttgttttttagcaattattttttatgctatttctaaaagtattgattggtgattgaaattaaaagcctaaaaatcatcttctccacaggcaatttgagaaatacctgcctaagttaaacactagacatttggaggggacctttaaaattaaccatttaacgtaagatagtgtatcctgactctaagttgattattgtagcagctcttgtatgcatggatgtgtgccatgtatgtatgcatgtggatggacatacacacgtgtgcatttggaagtcagtgtcttccccagtctctcttcatcttatccattgaggcagagtctctcccttaaactcagaacttaatggttcaggtagccgagccagctacgatgtgccatatttatggtgggatgaccacgcccatcagcatttacctgggtgttggggatctgaactctgggcctcatgcttatacagcaagcaatttacccagtcagccacctctccaacacccccattttaaatgtgcatatgtacgtttgtgggtattgtacttgtccaggggcacatgctcttgtgcattgaggacacctgtgcctcaggtgcctgtcctagtttgattctttgctgctgtgagaaacaccatggccaaaagcatcctgtggaggaaagcatactgtgatggcttacatgctgtcacagtccatcattgaggtaatcaggaacaacaaaggaaagccgtttactggcttgctttacctgacctgcttagcttgtttctatccctccttggagggatggtgctgcccattagtggtctgcctgctcatatccatcactaatcaagaaaatgctgcacaggcatgcccatgggccgatctgatggggataattccttaattggggttctttcatcccaggtgactctagtttgtatcaagttgacagaaactgaacagcacactacccctcttgttttgtgagaccgactcgctcacttttacctgaactcagtgaactcattctggattcagggattgttatcacagtgcactgttgtaaagctcacggatgtgtcaatttcttcctcgctcccaggctcatttggataggctgactggccagagagaaccaggaatacactctcctctgggccgtgagattacaagcaggccactaaactcagctttctttctttatgtaggttcttaggagatggagttcaggtcctcatggtaaagcaagcactttactaaaccatctttccaagccctgatgttaagttattcttattttaaaaaatgagatcattgagctgcaggaagtcttaggttcatttctcttaggtatttgacataacaagcaatgtgtaagataaggaatgcagcaatttaactttcatttgcaattgaagtattctttgctttttaaatcttcatcattcaggatagaagtaaagctagagtgcagtaggaaaagaaacagtagcaacagatttatttaccaagagcttcctgtgcaactgactattaagaaaaacaacctgttctgtgttttcagagatgagaaacaaacattcagagcaagcttttgccaacagcataggattgcaatgcaggctttctggtttatttcttgatccatttaacacagttccataataatcactggagagggccatgcacaagtttatagcagtcaacacaaggctaaaataaaacgggttcatccttcttcaacatgaacaagctgaagtatcaagtcattatgactcagcacttagcaatgttgatggggcagagaagcaactgatgcattctttcagatattctttcagactcttacagatatttatgcttgtcaaagtgtttcatttgactacttatcctgttggcctatcagagaggtacaattaagatctcttgaaaaattagagataaaaataattgcttgccatctgtcctttatggaaaatggaagagaaccagaacttgggaggcagagacaggtggatctctgtgagttcaaggccagcctggtctacaaaaagcaagtactagaacaggctccaaggctacagaaaatccctgtcttgaaaaaccaaccccccccccaaaaaaaaatggcagagaaaggctaattcttttgaggctaattgttgaactggcctgcctccatcttgggcctgaaagccattttatgttaaagacaaactaggttcattcctgtttatgattaaatgtgtttgtcaaggattgggctatgccccacctgtagccttaactacaactggttctgtactgcctgttccaggaaacagcaaccatgcttttgtttcaaaaaggttgtcattattacctgttgttatgaccaccttgcaatcatgcctttatttcaggagattgttatgaccaacttgttatgcttatttattttctgcttctgtaaccccacctatttgcctgttataaaaaccttattatttcccacttccaaggctgatttgttgaaccccatctttagggagagacagttcatttacacaaataaaaagtttgctctaattaattacctaattaatttgcccatgaagatttgagtcagaggtctttctcctcgaatatgtaggattaacataatcaatcacatattcattcattcatcattcattcataatttttctagtttatatagaacacaattgagataggttgatcttgtggagaatgtactcacagattgttaaggttttggatctgaaatatctcccataggctctatgctctaaaggctaggttgtcaaatgatagtttccctgggagacagtgggaactttaggaggaggggagtagttagtcccctttaaaggtggactataacctccttccttatctccctccattcctccttaccttctttctggtcacctggagacgaaagatttttctaccatatgttccttgctaggatgttctcttttatcacaggctcaaaacatggagtctagtgaccatggactggaatccatctttcataaatgttacagtaaagaaaagctagcacacaaattatttccttggttccataaattaaggttttcattaaaagaaatcaagtaattgtattaaagtaaatctaacttgcatcagcacaattatatttatcttagcaaagaatatttaaaagattcttttatttacagaagtaatttttgcattaattttaccttccatatgtatgaggtgactgaggcagagtcacagttagaaacattcctctaatactatccttgttgtgtcccgaggaacagaaagtcagtggcattaacatttccctttacccagttcctgttcccttatcacattccatctccacactcccttcctgcttttcaagggaatctgaaggagcacagggtatggagaggtaagtgtgtcctctattttaaacacagctccagcagtgttctaattcttttggtgaatttaccggtttctccctcacggtctcttcactcctcttcctacactttatgggttggtgtctcagtacttagaagctatagacacacgccaagccacgctaaccatacatactctcacaggaggcctgaaaacttcaactccactctcgttctcctttgtataatggtcagagctgaaatataaacatgattttcagcgttttccctcccgtcccccactaggggtagctgttattacctttctcttaccaaccattatgttaatggtctgtgatcctttagttttctttcctaacagctaccatgtattaaagttgtaagattgtttatatacacgcacccattggctactgctgagtgcgtcttcttaagcactgttttaggcattttacattatgccaacccctattcggtgaggccaataatacacttgcacagaaggaagctgacgtaaatgcgaggtaggtgaaggcagtggcatctgagcctgccaggcttcactgctgcctttacacaacggattcttacctcgggtacgctgcaccttttgctactccaacctcacccttcaacacttctgtccctccatctccccaggtttctccctcctccctccccacctcatgccataggctgccctcgttcctcgactccaccgctcccaagccttcccatccccgggtctgctctctgacacaaacgggcgttgccttccttcaggaaatttccctcttagctcaaagcctccaccccgctcgccggctccccctcttcacgcaagactcacgccgggcggccagggcgcacgcgcaaggcccggcgtttcagggcccgggggtcccggctcccaacagcccccgcgcgcggtgcaggctgggtgaacatggccgcttccggtctcgcactcaggctggcgcggcactgacggcggggggggaacatacttcttatgccagagtatgaatgaaatgatgaaggttctgtacacaagagaagcagccccgggcagccagtgcgagcatggagagcccggcagagccatgccaagaagcttcgctgggtcctcggcgtgagagctgaaaatgcagtttcttggtggccgatgcccttcttattcctgcttcattcccgctcgtggtggtttttacttcaacaggagttctgttgtcgagggcttgacgttttcactcttctgccctccctgtcacagggtttgggggccagcacatgaccagacaggtggcctgtggggacgttcagagagacaagactgcttcggtttaaagtggggcggggacgcagagtctcacacagccagtttcttagttcaaacatgagtgacattgccaacatagtgcacattatatgtggtgtctgtttgggacattctttaattaactgtaggtagtagcctcattctagaaacttgttagcttcattttaagtttaatgtaggccaacagtcacaggtgattatcatgtacaggcagggtagactatgctatttctattagtgtattttcaagttttgttttgttagtctacggagtacaaagtactacaagccaagtatggatgtttgactgtgtggtagctcagctttttctgacctgtcactctaaagttgtactttatttttttgtttttattaagaacttgaataaattatcttataactttgctttcgtatactccacaaaataatctttaacactgcctaatgtatcacacaatttctttcacccagtagactgataacattgagtactatttaaatttttttttatgtgtgtgcttgcatgagtttttgtgtaccacatccatgcaggagcccaggaagtcataaggggtatcaggtttccttaaactggagggacagggcagatgtaaccctcctgtaggtgctgggaactgaaccctggttttctgcaagagcaggaagtgctctcaactgctgagccatctcactcatcagctctgacttaaatttctattgagtttagctacaaggaaaactatacaaaaatcattaccttctatttgttggaaaatagtaactatttcctcagcttagcaaaaaacttcaaatttataactgaagtcgataaaactctcatctctgatggtctcaaatacttctattatgagatgaatttagttgaatattgtttgaatagttaattgatagtgttctttctgggaagaatataaatatgaaaatgaactctgtatctagttacaggggccattgtttttattttaataattttttttttctgaaacaaggtttctctgtagctttggagcctgtcctggaaccctctctgtaggccaggatggcctcgaattcacagagatctgtctctctctatctcctgagtgctgggattatattcagttgaagttgcttgaaaggaagtctgtagttccctactgaaagtatgttgtcttgatggagcgtgtgagtccttttaggttgtgctggtttaactttgccttctgggtcaacatagatctgatacttttggctttaaaagacctcttttttctttattcagatagtttctaatcaatggtagtaagcagtatgtgtgataaatcttgctttttattgccttctttaggcagctcttgcatactctgcacacatatagctccccatccctaggatgttgggacagactttaacataattttagttttgttggtcttgctctcattcttggtgtaagtaggactctacagaatataaatataaatgctctactataggccagttatgaagactcggatagacctgaccttcagcaatgtaccgtactattttaccacctacatctggtttccatcttctgggctgtgtactatagattgcactgtctgagtaggtttctttgatgtctgcttttttacagtgtgtagtcagatggtaagacgctgcgtctagtaggtgctctgaacattggaacaaaggaatggtgcatgtttcaccgctggtcttccttgctgtcctcattcaacaaaagactttcctgttgtgattgacctgaacagttgcaaactcatgttcatcctcagctttcttgtatgtgagccacaaggcaccctgtgtggtctttattggcagcattctcttttctatgtgtggtccttttgttatgtcctcctcaccttgtttgtcatcttctaatcttgattactttgactccctcttctctaattttccatgttagtcattttaatgtatctttttttcatcatcatatattcttgtgctgtagttactctgggtaatacttgcttgtctctggttattttggttttatcagttttctagttgacaaataatttagcatgcatgttccatgtcccatatttatgcttaacttcattaacaaaataagaagatttacacatgctgaagatcattcacagctgattgctttttgttttgagaaagactcactgtgtagcccagtctcgctttgagctaaaaaattttctgccttagtctcgtgagttttgtgattacagttgtgcactctctctcctacccttcaacgtaattgcattttttaaattgcatgtctttcttaacattatcatcatttgaaaatagtgaatcctgggttaccatttctgtgaattttaattatagttttaagagtttccaggatgcctaaagcatattttgtttcaaaatctcatctgtagttttaactttaaggacatttgaaagtgatatattggtaggaaatgtgcttccaggttttttcagtggtgatggatttgtatacaatcacattcttatccattcacatcatgactcatcgtgcgttttctgaggcctctgtccagaactagtgttagaagttacaacttcaggacagagtgactatctggttgattgtctcccttgacattgttattaccggcactgagtcaggcacttacaatcagtggtaatctaaaaattattttggaattcattattcctaaaccctaaaagaacttttaatttctatgtaaggcccaatagtattgtgaactaaccagtacttattatcaagagttttaaaagcccgattactattcaaaatatgacagttaatcctgaagcagagattgtatcctgtgtacttttttgttgttgttattgttactaaatctcatctttaaaggacattttctgaatatttattattttcagttgtgaataacacaagtcaaaactgtagactctaggacttttcctaaaaatagggatcctaatgtaatgcatcacactaagatacatttataaaaatgttataatggagaaattatgtgagagcataaataaacaaaccagtgcaaccagcattgcacccaagggaaggaaataactctggagggtacacaggtccagaaggcaggaagtttattttggaaagattccaaattaatgctattgtattaaaaaccacgagggcctaagattgcatgtgattctgggttttgaagagtggaaattctcctattctagtgtggaatgttttccattttagggaaaatgtcttggaatatgtcttattatctttatgccataaatggctgaatctcctaaagagatgctaataaaggacctggaatgattttataaggctgatttctacaggaagtcaggttaaaaatgggactctacaaagtgatgatgtcaggaggtttcagatactcagagtacaggggactgtggaagatgtcctctgagtggacagtcatcatttcagtcctctttcctgcagctctgtaacacagctaactgcttatctttcccactgtaacatacttggagaccactaaaagaacaagctgcacagctcttccttgcttggtacataggatccatggtaggaaccactttctttcacagactattgctactgtgaatatccttgaactctttgagctatgctcagtaatagtataaggtcccgaggaaactaatccttagggctctgcctctccgtgacatacccaccacggttatgctaaccaatgagacattttccatgagttccataaatgcttgctgttcttctcacatagtctgtgacactgcagaattcctgttcctgatggcagcaaatgagtggttctgtctcaccttgagtttgtgcctttgtaaaaaggacaataattaataggtcagtcattgagctataactttcttgacctaagcaaagatgcctgcctgtaaaggtaaaaaacaaagttaataaatcttattttattaatactaaaaatattctttcattatattaaagggggtaataaaaatagaaacattcagggtaagttttgcttttcacatgatagttgttacagtaacaaattaatagagttagtaaacagcataatgtagataatagccctgaatgtttgttttaggcttactgtgtgtggactgtggcactaagttacttatgtgtttttctcagataagtctgtgtaagctagacagtatacattttccattttacagagaagagaactgaaggttagagtgggttggccgtggagtccaggtctgtgtgatggaagtgactgtgcctgaagattaggtacctgtggttcagacagctttgcagttagaggacaattcctgcacagattgacactggttgcagaggtattttcttgcatgttagtgaattgagttttttttttagctttgaatattccttttttcacacagaaagcaagatgcctggtgattgtgtagttttcatttgcaaggacagttttacatttggaggtcacatgaattatgcaagtaaagctttttcccttccttccctgcccctccgactttgcacagtcatttagaatacttaactctagggctcattcagtgtctgaacccctaagttcctttgtgtttgtttacagttaatgtgttaagagccattgacatttgaagatcatcagaagtgaagataaaagatctcaaaaattataatgtaagtgaatgggaaactacaaaaattggacagaaattaatattgccaataataacctttggaatcctatattaccccaaatgaaatttgttcatatgagtaatcagtaacttcaaacgttagtgccatgttccagtccagaacatccttttgtctggggaaagcagtcattaagttttagtcacccagtaattttccattggggtatgcgggtgcctctgtgtacttcctcccttttcttctctaggactttgaagtttgatgtgagaacaggatgaatagggaacaaattatatttatgtggagagtttgttttctggcagcagatacatacatacagatacatagataaccattttgtgtgtcttagtcataaagagtaagctgtttcctcccttcccaccttctcctttcatcccttcatttctctctgatctgttgagtattcactatgtctgtttatgatatgggctagatcctacatttttcccctcctgagacagggcttaatgtagcccagcctggcttcaaactcactttgcagcttagtgtggacatgacttctgatcctcttgcttctttctaccactcgagtacgaggactacagaagattgttgcacttgagtttggaaattcttcagaccaaactgtgggctttttaaatgccaggcaagctctctaccaattagtttccttaattcttgatagcttggtgctatgacagctatattactgttaggtacatcaggaccactcagtgcttttcagatgctctggagacctgcacattctagttcaggtggtgtttggtgaacatgtggtttgcagtttctagccattctgaaacacagggaacagatccaagaatctgtactgaatgaagtctgagaaccatcagttcagatgctttttggagtcctagtccaactccaagagtttgaagatgagggaaaggcattgggaagtttatttatccaaagacacagttaatttttggaggctgggaaaagttaagtgttttttctttgaagccttcacaggtcatgttgtatgttttgtttggctagacagccttgctatgcttagtgtttataagcccttcctccatctcacatactagtatcataaccagtccaccattgtacctggaaaaacctagaagcctgaagatcacagtttctgagtctttagccagatgtatggctgattgtgactttgaaataatcattgggtaatagtttgggtggagaaagagcactttttttgtaggtcagactttcatagtcttgtctggattgaggttctatgcttctgacgatctgacttcttttcgtagagtctgtaagtgggaagtatgggctagctgtgttgtgagcagctctgttcattgtttttctccccttgggctctgtgaagcacagtgttaggagttgttgagttaactgtttatggagccacagatacagccattgatattaactcatatttgtaatattttgtaacagtatatttgtaatactttggtatttattgaaaactctaaggaatattttgaaccatatgttttgacttaattttattactttacatattttatatcgtgtcttatagttcttgagttgtaccttgtattcatagatgaagtttacccagttaaaaaaaaataccctgttatgttggaaacatgaaaaagttggattatataatgttactactcagtttctgagtgttttgatatatgtcttaaaggatgcttttcagatgttaataatttgcttttgtgatgtgggaaccaagctgaagcttgaagttgctcaaagtgcttcttgtaagttgttgttcacctctgcacacatattatcattggcttcatagatcccaattcattatcattggttttgtaaactataggctcaaatttgcaaatagatcatctctcaaagggaacttagtctgggagtatagctcattggtaaaaccaatgttaggcattcccaggttcagtccccagcatcataaaggaaaaagaaagaaaaatgggactttattatgtaatgttaattcccttccaaagacatttacttaagtaatttcatacatgcagaaagatacttcagaatgacactatatttctaggataacctgggaaatgtttgaaaaactagaatgtcatagttttaatgtaactgctacctatggagttgccttgttaattatagatgtttgccattgatttagtttaaaatcagaatgaaaaatgtatacattgatcagttgaacctgtttcttacttcttgtgctcagattttgttaagtatttaagtatgtgttattaaagtaatctttacacaagtacctaaatttctctttcattgtgtaagagtctgtgatggttaatgtcacttggtaagatctaaaatcccctgagaaatgggtacctgacatgcctgtggggagttatcttgattttgttattccatgtgggaagacccatttaaatagaggttgggaccattgtctgagcaggggagccttgtctacaaaatggagaaagtgagctgcgctctagtgcattcatctctgcttcttgactctggatgtgagtaaccagcctattgctgggactgtgcagccttgatggacatgtccctgagctgtgacttcttcaagtcgcttttgtcaggcctcttctgacagcaacagaagacactgaagcagaatcttactgataagttcaggttgtcaccttcactacttcaaatactcaacagtactatattggaagacttcttccagcaaatcttcatgaaagaaaatgattagcaaataaataaatgaatattcactcatctattcagtgtaatcacagaagctaataagcatgcaatttgtattttatggtttctcaggagagcccttattatcatgatagatacagactcagaattttccagtgtccctgctaataaaagatggaactggaatttggattttcgtataagtgtgctgttgattttttactcccaatataaattatagcgtggaagtggtaaaaagttcttgggatgtacattttgctgattaaaggaaatttcttctgttggaaagttgatgataggctcatcttgtccagtcagttccattaaagtctaactacaaagatctcatttcacctaatccttctctttctctgtattcatttaaaactacttcaaaaacataaaaaagacattcctcagtcctgtcataaaaataaagagaaaatgaaaaaagctagaagtaatgactctatggcctgttatttgtggcaaccaaccagaaatgtaagtatgtagggaaccgtgttcaaaagtatggatgcacagttgtgttttcttagtgctttggcttagtgataggaaatgagcagtaaaacccaattccacttcctcatcgtcacccagactttgaagtctgtgtggaaagttaagttaattggaaggactgtgatttgtgcagtaatagtagcgtttgtcctgggaaaggacctgcttagtttaaggcatgacacccattcatttaacagtgaattcacatatgcaagtagcatgagaagattatacaaaagtcatttattaagacacagatgggggctggtgagatggctcaggtaagagcacttgttgctcttgcagaggactcaggttcagttgtcagcacctatatggcagtttacaaccattgtaactctggttccaggagatccaaaaccttctgacctctgcaggcactaggcatgcatatggtgtacagacacacatgcaggtaaaacattcacacaaaataaacaactgtaagaatagtcttagtgggtatgtgttgttctgtgcttgccgagatcagagtgttgcccagatcaaagctttactgactaaggtgactaccagttcaggctttaggtatcttgagttacaatctgaaaaattcagtttaaaatatttctctcagttaactcatgtgtaaggaacttttcctgtaggcagcttgtgagtccacttaagtactaacttaaggtgctctctttaatacaaataataaaatagaattggaggagttattttaggacttctgtgactgtggggacaggcccggtgttggtgctagtgctggtgctcagcccttgttgctggccccacccacctcctgttgacagtcactttgattacagtgctttggtgtttgccagttctgttactgtggggaaaacaagtcttgcaggctgttaccagtataaattggttgttcagatttatgttggaattaacaggtcacatgcactgaattgatctggaaataaaatgataccaatgtaaccgtgtgttctagatgatctgttcttacttccttggaattttccaaagtgccagccggtgtcagccaaggctgtctgagctcaggtccactttgttctctgaatgaagattgatttctgtcatcagacacggtgataacacaaggtttgtgtcacctctattgtccttcagattggttacatttaaacatgtagagcaagctggagagatggcttagccgttaaatgctaggctcacaaccaaaaatataaacatggtagagcttgcacggtgtttgaaaacgaattaaaaatgtacagtactgtgttctggtgaagttgttttctgttttggagacagatattctgacagtaagttttttgtgttgcagaacacactgcaggccttttattatttaagtaaaaatttcaacagaatgactaacaagcataagcacacacaatgcttaggaaggacactagtccattgtgtgagtgttgagtgcaaaatttgcattcctagaaaatctttctcccaatcacaatacagaacacattctttaatatccgtgggcagcagcattaataacaagaaaacactctcaaaaaagtacctcttcttttcatgggatactcaacaaaaattgaattggtagtgagagaatctgtttaaacaaggcaagtggtttagatcttactgcagcagctgtggtcagctgagcctgggagtggaagaaacatggcttatcctgaaccctcttgagacttgtttatgaggagtgtgaaacacaggtgacatgactctaacttccgtgctgttttgagttaagaatgtgtgatgttagttacatttctagtatctctaattttcgattttataagaagtgtttttattgactttaggaatagtgggttaggaggaattaggggcatgaatgttggaatctgttagtgcttgggttttagtttctgtttattattgttgagtgctgacaaggattttattaacaatccagcagaccagtatgtcagagacagtactttgccattgctttcattaaaaaatactggtggtagacttgactttgtgtttgaagattggattagtgttattgaatagattgaaagttgtgcatggagtgtgtgtgtgtgtgtgtgtgtgtgtgtgtattttttaaaagttcccctagtatttatactctattataaggttgagttttggccagaaagattttgagtttagaaacttgtcagttttatattgtacatgaagacactttacagtgaagataggcttttaggtccaactggttgatttcctctctatttttaatggttccttatttatgatttcatttgttactcttctgatatggtgctcttgtatttccacaatgctgttggtgaacacttcctactagttcaatattaaacaatacttttatatagtatcaacattttataaagaatgagcttagattaagttgattaaatatatttgtctggtgtgaaaccaagattctttgactgaaagctcatgtttcagccactgggttctctgtctgtgtttcatgttttccttggtgaaccttccttctcacatttggctatgatgaggtgtgagagtgtcaaactagcacctcggttagcctgccagtctaacctactttgtacaatacatgatacacaacagcatttgttggttatgtagcaaaaagaaaaggaaagtgatttaagaaattcctgcttcctcaaatggagaagagggagagtaggagggcagttagctgaccctgccattccttagactccatttttctacaaagctgaggtggtgccttgaggtatggggatgtttgaggtggtgtgtgaaacctgctgtctgcagacattattgtttctttagcagcattaacaaaggatgcttctaggtctggtaatgtgtcagtacttctgtgggcactcagaggtgccaacattcatttgcttagcaggaattttcttaatttgcaagtttgcatctttagtcacttcaaaagaaaccccagaaaagtaggttctttaacttttgatactgttttgaaaaggacagagtaattcctgtctgtctgctgatacctggcctgtgttactgttcacatcagtgctgcactttgtggtagtagaagttttgaataggacagcaaaggaagagggcattgtggtaccacagtagatgagtagctgtatgagaatgactgagtcagatgacagggttctgtctggttctcgtggtgcgtgaagcactgccactgacagagcgcagggatggctggggatggagactgagtgctctcgctgttctgtgccctccttttttgtatatgtgcgttctgttctttcagagctatatgggattcatggagaaataagcattcaaataataccagctttattctttttatgtaggaatttggaagagtgtaatttgggctagaaagggaagagaatcttggattgacttccattttttagagtaatgatgagaatttagataaatgcattctcccaggccagtacacaaccattaagttacaccccagctgtttgtgagttgttaatggtcttctttaatacagtacagtaaaattgtaatgctgttgtgaggggtagttctcataggaaaaactgtccacctgaataatgtaaagtgtaatggacatcttggacagtgctggttatattctgaccagttttgctgtaatgcttcatcagtttctaagatttgtgctgcttatgcttcctgtgttgacctaactttactttatgcttcctgtgttgacctaactttactttctgaagagaggcattaatgctcgggggcatggagtgttgtgatcactcctgttgcacagcatagttgactctgtgttgttttgaatcttactaatatttacatgttatacagtgccttagaagttgctagttagggctttgagctttgtcagtatatgtttaataagtatgtgtatgtgtgtatgcttgtgtgttgtgtttatgtgtgtctatttgtgtatgtatttgtgtttatacatatgttgtgtttatgtgtatatatttgtttatatgtatttgcatttatgtatgtttgtgtttatatgtgtgttttatgtgtgtatatttatatgtgtatatgtgtatatgtgtgtgttcctattgaaagatatataggaatagaagattgtgattttaattttagttcataactctgcttcctggctcaggcaaaaaggcccacactaatcaggaataaaaaacaaataatgctgagggtcaaggctagcatttttcaaatgtttacatttgtgtgtatgtgcacagactgggagaggagagttggggactatttttgctctcaggagtggaagagttattaaacctagcttaacaaaatgatttcagtgtttgtaacagtagctctcagttcctgtcagtcttgagtcttatagtctccctctgctgacactgattatgggaactcttctgttttcttccttgatttttctttattttgagacagcatttcattaattctattagcaggctagaagttgctacctttccttgcttcctaagccttagggggcctgtccttccacatcctgccaactctggttcttggtgtttcggttgtgggcttagcctttcacaaacggatgagccatctctctatccctaactccgtttctttaaggatcagattggtagactttcacccattttaactttccacttctgtactgaactccattgtggtcaactgaggttttctaatggttagatgtccttttctagcctccgttaagtaaaataacagttggcatggtattgtttgtgaggaaatgtgctaagctgttagatgtattattgtattcatcattataagtatatgaatagctcttagcattgctaagtactcagtaggtattaactaatttatccaataagtttaaataaaattaaacctatgagtgtctatcatatgccagctattatcatagagctaggctagtgtttatcatctttcaagaaaattattaccctcctaaggaatgttttggcacatttctctgtcctatcccctcttcctcatgctcacacagtgggtatgattttatctactgtgtttgggaattaaaataataaaattttcactgattgtgttagtatatgcttgcaatgccagtacatgagcagtggagatagaagagtcagggattcaagactagcttgggctacataaaactttatctcagaaaccaaaataacatttaaaatttgttgttggtttttttttttttttttggccctacctcagtgggccattttattcacacccatggggctcatattctcccattgggaatgtgtgttctggattctggggatcccataatgatcagtatcgataggatgtggaatccttaaaggtttacacttaaaagaatgtgggacacagaaaataaacacataagacacacgtgatgctgtaggtaggaaggaaggaaggaaggaaggaaggaaggaaggaaggaaggaaggttgttaatgatacattttaaatatgaactgactgtgagcagaagttcaaaaaaggccaaagggaaaaccaggaatgtttgcaagaaaagagtcatcaggagtggtacccaacggtgcctgcagggaagccatagagcaactaggagatgaggtcaggacagcagcagatagcgagacaatgcataggtcgtttgttttaagggcttcacttaccctagcattgacatgggaaggcttaggaaagttgaggagagatgaatgatgatgttggttgctgtgttaagagtgaatggaagtgcagaggcaaggcatgtgttttaggaactccttcaggagggaaatgatacactagcagaagagctgtgtcacagtgattagagaatgcatgtgtttcgaaggccaaagacgttcttgagaaaaaagtgaaaaatgtctgggtggtggtggcacatgcctttaatcccagcacttgggaggcagaggcaggcagatctctatgagtttgaggacagcctggtctacagagcgagtgccaggacaggctccaaagctacacaaagaaaccctcttcttgaaagaaaaaaaagtgaaaaacaattcaagtttttggttggaggaagcagaaacaagcatagagttagctttgggggtctgtggaggcacttaaataagtaatttgttgaaatctgagtctagggaggtctagagttgacctggaagtcagggttccctcatgtagaggtggcagtgttgaaaggcccagtgaaattattaaggagggttatcagtgtcctggacaggagcagttctattggtataataaaagccctaatgaagtggggttaagagagaaatcttgctctgtaacacaaggtggactgcaagggctttaaaaggcctaggctaggtaagaagccatgattcaggctgaatccaggctttgtgattgagaagttttctttgggttcatttggttatgtggctataggtgtggaatagcagagagctggattttatgagtttttggaattaggactaggtgttgttggatatagttcagtctagttctcagagtctgagacaggagggttcgaatagggggaagccagcctgggctgcatatcagcactatctgtcaaagggaggaaggaggaaattgagaatattagagtcgtggtgatcctggagcaacgtctttgagaaatgagagtttagctatgatctcaacagggatggtttgcatgatgtgggtttaggtcagtccactccctaggcccagacacagaggagaggtgtaggaaagtagagaagtcagagagagagagagagagagnnnnnnnnnnnnnnnnnnnnnnnnnnnnnnnnnnnnnnnnnnnnnnnnnngagagagagagagagagagagagagagagagagagttgggtgtgtgttatgaagttgtgtccttagggcaaaatctggcattaggaggcataatagatgaagaggccatttaggaagagctatagtgaatacagagtttgtgtaagaagcatgttcaagcccaggaggatgctcattccccttcagtttcatctctgtcagaagcagagaaagccaggtagaagagaccagcttctgtggcagatgtgtgtatatttcagccactcatttgttactctgtctgtaaatgcattctgtggcgctcatgtactggctgaattgttgactaactgatgcatatacctgattttaaaggaaatatttagaacagtatttgatggaatactcgttcggtacaaggtagtgttattacatgatgtaggcagtagccaggcagcctcagactgaggagtcaggctagagaagtgtaagtggcacttgggatagaaaggtggaaagtgacttcagaaaactcatctgtgttaaggaggaactagaggagaatccagaggaagatgtgacagaaccagcaaatcttaatggcaacagaagaagcgtggctagaagacatgtgacagggtgtcactgacagtcaggttgaggtattcatgttgagttcctactaaatgactagcgttacaagtctgtaatacatgtgcgtgcttcctccatgtaaaggagactagaagaggacaggttgaagagcattggagggaaaactgaccttgtgtctgaggacatttcatcatctgagatgggaaggaagagttggtttgaatgaaaggaattcactagggtggggtaggaagttgaatccagccacccctcagcacctgtttccagtcctgtcagcttagtgttttcaacgagtaacagactgtggtggcagagtaatcgataggacatcttttattgatactgggttttctgttttatttgacgactctgtaatattagctaatgctgtgtacttattttaaaactgttttggcttgtactaaactgattttccatctctgattattatttttaacttttatttctcgtctgtacaccagtagatatatagttgtatttactaaataccaaatcctttctctactccttggatcagtataatttaatggattagacttagtcactatccagctttctccatggagtaatagctttctgcttatttagtgagcagatcaatttgagtagttttgcaagaaccccaccttcagtggcatcagcattttatatatattctttttgcattccctatctgtttaaccacttgttttttctgtgactcttgtgtgtcataatatggacctttctggttgtctattaagtaacttcctgataaaccaaaattcttccagaatttttccagcttaaacctttctcagtcacatttaatgcatccttctctgtgcacctgtagcacttgtttttaaagttactcttagagcatagttaaataagtatctgcatcgctggtgcctgttccttaatagcacatctaatactgaactctgtgcatctttacagtgggaagtcatgaataagtcagcatcaagtaaatggataagtaacacatgcacaaatgcatagaaagtaagctctgagcccctctgcctcctggtacatatggcagcacacatcagctccatctgaaaaattcctagactgaatccaccagctacacacatgattcagtttgttatcatggcggagactctgagccttaggtacctggtataagtctcacaagccccaggtgtgctaaccctacatgttgtcaacactgctgctgattgttctcaaagggtgctgacaacaaaaagttaagagccactactgctgtctaatagaaaaagatttttcatagtgacattggagggactggacttgagtatgttgaccaaagacattgctgtcaagtaagagcttgctactaacttctcagttacttcccttgaagcttactgatcggagtagtaccacagattgtttaaggattatttgtccttctctctgtctttttctgtgtagccctgctgtccaggaacttgctctgtagataaggctgacctcggacacacagagatctaatcctcttgcctctgcctcccaatttctgggattaaaggatacaccaccactgcctggctatttgtccttctcttcggtctagcatctttttgtttttggtttttgtttttttgttttttttttctagacagggtttctctgtgtagctttggagcctattctggcactcgctctggagaccaggctggcctcaaactcacagagattcccttgcctctgcctcccgagtgctgggattaaaggtgtgcgccaccaatgcctggccaggctagcatcttaaaggaagtgtttgctctagtgtcttaaggaacctttgcctgggagtgcatacaaaggactccagaaagcacaaaccttccttttctttcaccctccacgtttcctcaagtttctgttttattttatctgtgcatcctcatcattgcttctaaaagagtttgatttgaatcatccattcttttgatctttattctttcacttgtgtatttatccaacaaggactttgcaagtatctgctcaatgccagttgcatgtgagagtctagggacagaatggggtaactaacattcttctttcttgacatttcccttccttcttgaaatttgcaatcttatgatatgtagccaattattaaacacttgccaagctatataggagcagattaggataagtggaaagaaagaaaacatgaagtaccgtgagcttgctctgtgggtcccacatccaatagcattcctgaggaggaagtgatgtcccaccagccagctcccaaataataacacagagacttcttattatgacagctcagcctatagcttaggcttgtacctaactagctcttataacataaattaacccatttatattaatctgcattctatcatgttgcattgcctctctgtttactctctttgtctcccaagtgcctagattcttcctcatcttcctttctctccttggaaatcccttctatacctcatgtgtagctatttggctgttcagctttttagtacaccagtcatagcaatcaatatactttcacacaatgtacaaataccccacaatatttcctcctttttatctaaataaaaagaaaggttttaactctagcaggaaagctatatacaataagaacaattatcaagtaagaattacatccacaatgtttagtccatatatatttggcaaatttggagaaagtgctgtatttatactatcttagtgagtccaaagttttatgcctaaaccattttcaaccgtaacatgtattaccatcctggaagtatctttttagaactaaaaatatcttcttagataaacaagatattatgtttctcacccttataaacttttcatctcttatgtaaatttttttttctgaatttggtaacaaggaaaactctataactgtctcatcttcaattccatcagagactggagaaatatacaatactatctgagtaaacgggaactgcagagcaagcagcttccaaaacagtataaatgacagagacatctggatgcctggacagtcatccaaggttcctctgcaacattggggcatccatcttcagcctgcaggcctacaatatctgacaaactttactgtaaagcccagcgttatcttggcaaagctcagcagcctttttcctttgtgaccagtttggacagtatattgtcagcagtcaggcaagggcagtttcttacccaaatggctaactttgccatattgaaggcaaactctatatggagtttcctcaatgcctatcatcctattatgtagtagattgatgctgctaggagcagatgtttttcactatcataaaaagccttgtgttattaaaacattttaaatgccatattctgtaggtctttgaagtgtttgaagaccatttatttaaaatatatctgaccttgaaagcatatctaatatgactataagtttgattgttatagataactaactaataacctgtcttttgttgttatcctaaatagctttcaaggactaagactttacattgcctttttaaaagagctgtgtaggcatattaccttaaacaagaatagaaacatatacagtataacaataactttaaatttgtatcaatatacaaaaatatctttaaaaagagtagaaatatatatagagtatgttctgacaaaagcaaccttaaatttgtatcagtatatacaattccataccagtgtaaaatatttgagattaatagttgctttttagttaaaagtagattcaataattcacccctttattctttcattcctatattccttttttctttttagaaagatcattgcatccaatctcccttgcttagtttcctcccttaccatgaccagtaacaatttgtaaccaacctccctaaacaatgaaaaacatccataaatcactggatgaccagaaaccacccatcccacctcttgggaatgtgggcttcatgttctttaagctgcttcctgttgtctggggctgatggcatcttcaggggatcctaagaatgttgggataatggtcaagtcctgagaaagctagctgtatttttttttttaactttgtttagtctgtgtgatgggaaagttgtagagcttatctgaagttttggctgtagtctgtgaggctggaccatctcagctagcagctttgaagatgttcttggtgcagaattttgaggaaactgtaacagaggcgttctgaggggctggatcacttgggctagttgtctttattagtgtctagtccttcatctttttctaaaaatacacaaaacttttaaaggttatacatctgtgttagcacagtatggaatgtgcagtgtgcacaagtcagctaaagatgattttttgttctatttttgaacagataaagggtatttgttagctttataagtctgtttggactgtataaccaaacctccatccatgtcatatgaaagaacggcatgtaataataagtcatgaggattctgtagccaacaagatttagcatgtctcatccagtcttaagagctgttcccataatagagggatcacctttgtctttcttggctttttcctttatgtctttagccaagatcctcaggaggtcacccaccccactcccacccccatcgaatctgatcccgattatctttgtggaaataaaagcacaacctcttccccaatgcaaccattgtccaacttccattttgaagtcaagacatccctaaaatatataagctggattaatttagcagttccttccaaaatccagagtgtctcagcagctgtcggtctctgttcattagcattcaaaaaattaaagttaacaaagtgccgtacatgatccagacaccctgtatttcccatttttatatgttttccttttatattaccttactctctctttaaagactttgttacttttaaactattttttctatgaccattctcttttctttgacatccaagtacatttttaagcacactatacctgtccagaggttttcttgatctgtgcctgacttttgcacatctacagtgttttgtgatggcattagccaaaccttaaactgctgtcggcatctctctctcgggttcccccacgagcttagctttctgcctgtgggggctgtgtttaccgccccagctctgggaatttgttgtatgtgcctgaactacgagtttgtacccagtgccagctgctcaggtgctctgctgcacagccacacatctgcatactaagcctacctaagaaactgcagtcacccggaagctgtactttttttttttttttttttttttggttttttttttttttttttttttttgtgaagctttcttaggccttatgtggttatatgtggtcccatgttgggcaccatattatgtaacaagtccttttctatcctgtcagtcagctcccaaataatggcatggagacttcttactaattatgaaagcttggcctatagcttaggcttattcccaacaagctcttagaacttaaattaacccaattatattaatctacattctaccacatggcattacctttcttctctcttgcacctcctctttcctctccatgtcttctggcatcatcaatgtgcctagattcttccacctcttcctctctccccagaaatcccatgtatacctcttgcttagctattggcctttcagctttttattacaccagtcacaacaatataccttcacacagtgtacaaacaccctacaactggtgacatttcaggcgagagctgaaattgaagatggtgcctgaaggaaccatgctgcctgaggaagtctgtcttatttaaggatcacagggaagacttgtttgttggactggggagaacaggggagatggatacacacagaaagttggagaagtctggggtcaattagctcatgtagtgagaaatttgtggtaagactttgttgctgttatttgctattttggggctaagagattactgtataacccaggttggcctcaggtctgtggtaatcctgcttcagcttccttatgcctaaaattagaagctgaatcagtacaacggcctcataaaatgatttaagctagagaatgacatggtttatttctacctttttactattgtgaataatgatgctgtaacatttatgtaccatttgtatctgtttgtgtgtcttgtgaggccatattttcatttcttttagggctatctttggaggtcatagtgtgtcttagtttcatttctgttgctgtgatacacactgcccaaaagcaacttagggaggaaaggtttatttggcttacaattccaggttatagtctgttattgagagtaagtcaaggcaaaaattaaagagcagctagtctcatcatgtcttcacttaagagcagagagaaatgaatgaaccaagctgtctatttgccactatgtaggctcaacaacttcttcacttttacagagttcaggaaccagcctaaggaatggtacttcgcacagtaagactggctggacccccatcatttagcagttaaaacaaacccacatagacatgttcataggctagcctgatctaggcagtttctcaactgagttctctgttcaagttgtgggtagttgacagaactaacctatagtgggaaattaccaatacggagtcagatagaaatataagggtatttaatagggaaaagccttacttacagagcgacctagccagccggcgtggtagcagtctgtacagcaagtaccaaagtgaaactgaaagagcaaacgcaatcacaccacgtcactctgaccacgccctcacaagcgtggtcaggcacacctgaggccagtccctaagtaggagtggctacagcttcccctacactaaccattatgtagacttactccaatttgtccatcaaaagtgactgtaccattttgcattccactcaggaatgtttgagtactagtttctctacattttgccaatatattatgtcctgttgtgtgaacagaaaatagacacataatttgcagtagtctaaggatggggtgttgaattaagactaagagcatctcactgcagtaacatgtccagataatatggaagtagatctacaggactttagagtgatgaggtgagattggtattccagctagtttatatccacttgacacaggctggcatcattgtaaagagaaaatgtccctaccagattggcttgtgcacaaacctgtgacacatcttcttgagtgatgataaatatgagaggtcctaactcattgtgggtggtgccattcctgggcaagtggctctgggttgtaaaggaagcaggttgagcaagccatgaggagcacccctccatgacttctgcatcagcttctgcctccagtttcttgctttgaattcctatcctgatttccctcagtgatagaatgtgacctgaaaattgtaaaatgagatgaactttttccaacccaagttgcttctagccatggtgttttataacagcaatagaaaccctaactggtagaacagcttgtagaacagaagtagagaaaagatagttttggttttcagaaatcacttgggacttggaattgtgttttgacactactcatagttctagatgagttttacatgaagtcaatgtcatgatatctttcactgacagctaagctttaagatgcctgtgaaaatgtcatataactgattacactacagagctgtaaaccggtgaaaatgtaaagttaggggttaacatagcttcaggttacaagaggatattgagggtttgccaaaacaaagtagaaaatgaatgctcttgagttcagtttggatagaaaggggaagtgagacaggcaagggagagcagtggattagaagaatggaagggttgagggactggtgtctgtatggggctgaagactatatgaaaagcaagtaagaaagcaagattgctggaaataaaaaccgtgtggtgagaaattgagttcctggggttaaagataatagaggcagagttgttctagaaccgataaggctcacattgatgaagtgggaatgtagatgaggaggagtatatcctgatggacaataaaattgccacacagatagcagctttggaatggaaaaaaaataggaaagggccaggtgaccaggaaaagccctttgtgtatgaggcatggttagttaacaagaagggattgcaacaagttgtataaaaggccatttacttcagaagtcttttacatgtgaagatagaaaagtacattactataggaaaatgagaaatgagctagaaaaatgctgagtttctttggcctttattagatgtggaaaaatttaaaaaaagaaaaaagctgccttcattcaaggggctcggggaagaaaattcctgggagatatcaactgaggtagaggttgtgagaattctgctgcagatgccaggggtgtgttctctgtggagtaaagattccagcataaatgttgagaattattgatggatatcctagacagaaagtgggtggaagaaactgagtaatatggtaacagacattcataactaagagatgactagaatcagaagcccagcatagcaagaggaacaaggacatggggtggactgatgaagtgatgaagtaatgaagtatgtgcttaggaaacctgaggaccaatttgttattgattgataaatgatgttagcagactgtacaatgccctgagatctagtgtattgccagttacaaggttcttattgtctggcagcttataattcacaggtgaggtggccatgtagctgaggctctccagtgttatgaagaaagtggttaagtgaagttaaagactgtggaaacataagatggagagtttagtatagctggaaggcctggggacttcttggaaaagtctaggttttccctgagtctgataggaaaagtagcatgttaataaatgggctgagctaaagaaatagtctgtgtgggatggcatgatgtttgggcttgtggaacaattggtaaaacaagtcttgacatgaagatgagtaatggagaaaatgggaggggaagaaaagtgggaattagatgtgttgtattaatagccgtggtgaccagagcatgcacatactaatatgtgagaaggaaaaggaggagggtggggtgtcctgaaacagagttgtgcttctttgctgtggtacctcaatctgaggaagcccccttccctgcccgttcacccccagcagcacttgatgtggacagcagcttttggcaatcctgccaatgtgtgtttctgatgtcatcacagggagagtgttgtgccacatccacaccctgtaccctccactttcatcttgtctgaaaagagaacttaaaggctggccagctggttcttgcttgaaaacccagattttaaaatctgagattacaaacttgatttctcttacttattttttcactttgcttctaacagttatttggttccttgatgccacattgctctatcaatatttttataaataatgtaactaagtagaaacataatttggagttgtattgcttttaaaagttatccttattctcacagaaggttgtgaagtagtcctatatgtattttaaacttacccaaatggaatttagggttgctgtattagagttttgtttagttgtacaaaacagaaaatcctattgcagtgatttttggaaattgatgttcatttattctatgtgacatgaattctagggttatgggatggctgcagctgcccagcagttttgtgaggtcctaaagacccacctggtggactttttgtaacccccccatccccgtttacagaatgactgcaagagaaagggaagacaataaggcctgtcttgcatatatgccatactccgttttagtaaaaagaggtctccaattgctattagcagacttcgaatctgatttcagtgactagaattgtctcttctggtctttgtagccacaagggaactaaagtgactcttgtcttctcaggcccagcacaggatgctatgggagaggaaaggaactcttccatggagtggtgaaaatgaacatggattacaccatggtcttaagttttatttcaactgctaaggcaaacagtgttaatcaaaagctagatgcaatgattttgtattttgttcatttatttgctacttgttattgttaataaacaggcttaagatggacttgtttattttaaagctaaaataataaatattgtcacaggtcctaagataggaagcatttcaagaaaaaataatgaaacaaatttagactttttatgtaaagggttagggttttaatatatttgagaatgagaccttaaaaaatacatgtttgtacatggtggtttatacctgtaatcccagcacttggaaggctgaaggcaggaggattacaagttgggtgttcagcctgagctaatttaaaagtaagtgtgtgtgtttgtgtgtgtgtgtgtgtgtgtgtgtgtgtgtgtgtgtgtgtgtgtgtatgtgtatgctcatgtgtacgtatatactaacatacatatctgtatacatattttaaatctgcattttaagctttaatatagtgtcttttcattgttaacttatttgaatatttttaatttaatattttatatgatttagattttttagaaataaattaagaatgcattttttatccttgagggacttaaaatgtgtggggactgagttacattatttgacatcagtaaacaataaaaagtgtaatgtgatcaagtatcaaaagttgaattcaagaagaatggtaactgttgactgtgattacttccataacagtccatgacaggctatgtgagagtatggagtcaaatgtgttaggaggccccaaggagcaaaggcgggtctgtctgcaccacccagcctcgttgaactacatgcagattcttggatgttctctgtgttttcatgttgccatacctttagcattttttttatccatgaaaatttattgcgtaacttcttttaaatgattagttttttaaattttatattactgtttcattcatgtaagatagtattatatgatacattgtatggtacaggtccctcagaaattctaaggctctcctatacttctttgaggaagtaaagactcctcagacagcatgtgaatacatttttaaaagaatattaatggaacagaattttaatagcactgcactaaccagcttcaaaacctgggcggactctgaattgaatgctggcctttatcaggagattatcattgatgctttgtggctgttcagcatgcgcacaaaccagcacctgacacaaccattggtattcactgtgttagtgtgtttactgaaccatgaggtttatgtcaatggcagcagaacttttctgtaaaaactatgtgcaccccccaatcaagcaatattttgtccaaaacttactcactaatgtagaatattaaccaatccattagtgagccactaaaagaaaaaaaatcacaaaaagtaatcattaagttttaattattttgttaacataaagggtttggaatgccagttaaacatcatgactctgtgtactatggtcagacagtgtttacagcacttttttattggcctggcagtttactctttcaggactcagctcaaatgcaaatgttcctaggccatggtcggtggcgggtgcagtttgcagcaggaagactaggttccccaccagcctggtaagggcaattgagaacttgcacctaaaatatagtatttttagaaagggctagaatatagctcagtggaaccacagcctggcatgcacaagatctgattcatgtgccatcatgtgccgttgcctaagttctccctgaattttcaggtgtgtgtgtgggggggggggtttaccacatggcccatttattcacttgcaaggttatgtcacaagctcatgaaccacatgcacatggggactatgccaaatttacctttgagtcactgtgcctgatgtgtagtggttttgtatattggaaagttcttgtaaacctttttacacttattgattttgggtgtatatgtgtttatttgggtgctcatgcaatgacgtgtgtggatattgaaggacaacttaggggaattgggatggagctcatatcatcaggctttggggagctcatatcatcaggctttggggcaagcacctttacttgttgagccatctcaccagtccccctccgtgagtgttctttagatgaataagtaagtaactgagtggatggatgaatggataaagggaacatatcatcaggctttggtatatgtgtttatttgggtgctcatgcaatgacgtgtgtggatattgaagaactcatatcatcaggctttgaggagctcatatcatcaggctttggggagttcatatcatcaggctttggggagctcatatcatcaggctttggggagctcatatcatcaggctttgaggcaagcacctttacttgttgagccatctcaccagtccccctccgtgagtgttctttagatgaataagtaagtaactgagtggatggatgaatggataaagggaaggaattcatccaaatcatgaatattgggaaagtctattcagacttgagattcaagcatacttaactattaaagaacagggtctgaaaatttcctgtctttagaaaccattgaagaggtcacccaggacttgctgacaatgcaagttgcagtaaatattggagttacaaaccaaacatctaaaattggtcaacatagctccattttccaaaacatactgtgttttcatattttctagtgcttccacttctcattcagagaactcggtgcatacgaaatcagtttctgccatatcttcagattccatttcaacttcggcagacaacttttctcctgatttgagggtatgtatgctgcgtgaacatactgaggatggccatactgttcagtgtctgaccagcactgtcagcaaaacctttaataattaagtaggtcgtggcagagagttctcaaagaccgcagactttataaattctcccagaccaggccagcaagtttgaatgcttgcttacgattttattttatttttttattttttatttatttatttatttatttttggttttccgagacaggatttctctgtgtagcttttttttttggagtctatcctggcactcactctggagaccaggctggcctcgaactcacagagatccacctgcctctgcctcccgagtgctgggattaaaggcgtgcgccgccaacgtctggctacttaccattttaaaaaatgtacatttcattccttaagttagtactttaaaatattttgtctaatttattttgtggtacttttttcccaatagcttccatattaccaggcagtaataactaacatgcattgagaacttaccataagccagttaactgttgctctaagtaaattatctcttgtaatacttgagatgttttgttatttccatgtagtatcttagattaatatgtccagagattcagagctaatgtcatggctaatcagtttagttatgtttagccagttgtattagtcagggttctctgaagaaacagaactgatagaatttattggagtgtcattcaggctgtgatctgagtagtccaatgaagggtgtctcctgatgcaaaggccaagaccctaatagttgttcattccacaagactgagtgtctccgcagtcccaatctggtactggagtcccagagaattcgtagagagctgccagtcttcagtctatgttacatcagtgaaagaaagcctcagcaagagtaaatgaacttcccagcaagagtgagggcaagcaggcaaaaacaaaagcttccttcttccatgttcttttatgtggactgccactgtggtgtggctcagatataaggtgggtcttcccacttccaataatctaatccaaaaacaaagaaaacaaaaaaacaaaacaaaaaaccctcacaggagtgcccagctgcttgggctttagttgattacagatgcagtcaagttgacaaccaaagctaacctccacaccaccgttctatcttgttgagtccaattctgtagttactaagcaccaggtgatggatcattcttacacatctcagtacattgtaaaatatccctgtatttttgccttatttctacagaattaaccacacatcaatgatagcatatttgtggattcatctgcttttcttcaaccacttgcctgcctctgcctcccttgagtgctgggattaaaggcgtgcaccaccaacgccctgccagagtttctttttaaacagtagacattcattttcatggttctagaagatgggaagtctaggttcaatgctacagaccagtgtctgcaagcatattctatctggtgttctgtattatatgggacgatctaagagaagtttactccagattgtaattcagaatgcctctctctggcagcagggaggaacagtttctatgagctgaaccctgaatagctgtacaaaggcttaattatttttacacaaaagtcgatttttttttcttgtaggaataaatactgatctactaccagaggccccatagattgccaaggcctcctaactgacacccatgttctgggggtctggatcaggtattcacaggtagaccagtggcatagaattgaaaaccctgatatcaacccacacacctatgaacacctgaaatttgacaaagaaattaaaattatacaatgtaattgagaaagtattttcaacaaatggtgctggcataactggatgctggcatatagaagactacagatagatccatatctatcaccatgcacaaaactgaactgcaaaaggataaaagacctcaacataaatccagccaagctgaacctcttagaagaaaaagtgggaagtacccttgaatgaattggttcaggagaccaattcctgaacataacacaagttgcacagacactgagattgacaattaataaatgggacctcctgaaactgagaagcttctgtaaggcaaaggacatagtcaacaagacaaaatggcagcccacagaatgggaaaagatattcaccaaccccacatctgacagggggctgatctccaaaatttacaaacaactcaagattattttcttaaaaaactaggtaacaggatatttagaagtacctaagaaataatcatagaaaatcctgaattggaatttttcatgtaagcatcaaagtacctgtttctaaaatactgtaaatgaaacaaaattgtgaaccatctcaaagcataacagtttatggaggaagaatttgttagacggctttggctttcactacattttatagacagtttgatataacagagtctcaagctggaccaaaaataattttaggtgactactgtaaagtaatccattttttattgatcgtaattttgatttaactccttttggccgttatgaaaatgtaagaaacatgtaattatatttttggacattgcattatgtagaagaaatatttttaaactttatttgattttagtttacttttatctctttttaaaattcattccaagcctgtttcattgctatttttttaattttttatgttatacaaaactataaattaaaaaatttgaccaatatacctgattttaaccaaaacccacttttacctgttaggcttaaccttgaaaacacatataggctaaagcttgttcttgtgaatgaattaaatttgaacttagcgtaactataaacctggccctgagcacatttaaaaaagtgatcatttaaagtggtttaccattaacttgtatgtcttaaccatcttttaatagtttataacaagttagcagcttttaaaagtttcaaattttacagctttactagacatacatctctaagttaacttctgtcaaccctttataatcttaagaatttatcatcacacaaaattcattctaatctaaaatattttgggtctaagaaaatttttaggtgttgccttttactaataacagctacagctattcttgactttcctcttaggcagggttttgggtattttgttttgttttgttgttttggttagtgttcttttttgtttttgtttttgttttatgagacagggtttctctgtggctttggagcctatcctagaactagctcttgtagaccgggctggtctcgaactcatacaaatccacctgcctctgcttcctgaattctggtattaaaggcttgcaccaccacggcccggcttggttagtgtttaaagcaaggaaactaagttaaaggagcacattaagtgttttttaaaatttttgtctctctttttttatttctatctccaaactgctcatgttatgcattctttcagatctaaccaacaacataccaagaagccactgtcactagcacagcacatagacagtgaagataacccttagaactgggggaatgcctttaatcttgtgtttcatggagtcttacaaaaaataatgacaagtattttagaacctttatagatatccctaaactgtcttcatgtgtttgtttaaatgaaaaataacattctcaataaacattcaacagcaaagaacctcattactgaagctatttgtattttccactatatgcgaatacaagacaagccaggaagagtaaaatgagtaaaatcagtgtttgtgtggtaaattttagagtgactgttttctataagactatcagtaagagactatttctatcagctaccactgttgtagccacgttatctgaatagctggtaacctattctgttttaggtggtatatttttgtagaatttaatggagggttcccagagagtaacttaaggaaacaggccaaatcctcaggagtgataaacagataagagtataaccaacaatatagttcaaaattgtaaattttgttttttttttaatttaccatgaaaaattaatcattcattagataatcaggaaaagagaacgtcctcaatatagtcaattactaatacctctggaaatttaaatagcattggcttagtgatttatgcccagattgcaattgtttttatatcaaaagttgggctttttaaatgtttttcccataaggggattattgatagttattccctttattagggaaaaacaaaaaccatttcccatgaagggacatttaaatattgacttactcccaatatgaggggggagaaacatttaaacaaaaaaacagccgggcattggtggcgcacgcctttaatcccagcattcaggaggcagaggcaggcagatctctgtgagttcaaggccagcctggtccccagagcaagtgccaggataggctccaaagctacacagagaaaccctgtctcgaaaaaccataaaaaaaaaaaaaaaaccaaatgaaacaaacaaacattaacaaaattctcagttgggggttggctgcattagctgcagcagtgaggccccacccatcatccttggaaattcaggtgttgccactgttctgcattggcatgcccttagctgaaagagctgacaggcagcaagaagccagagagcggagttctagctgctagtaatttttcaatcttttggaaaaattctattcaccaataagcgaggataaaaagcttactttatttttatgatattttaggatttattgtgaaaatacgccatttttcatatgaatgtaagattttgtaattcttaggcactcaggaaatacttgtagaaaatggcagcttcatagtgtatgtagcaatactacagtttatataatttgatttaaagtagtataataagattgcaattcaaataaatgcagatcatctggatgaaatttgaatggaaaaaaaatagccttcgattaaaacaatgtttctttcttacactcccccatctaggtcctgagggagtcaaacaaattagcagaaatggaggaaccaactctgcttccaggagaaaacattaaagacatgggtctgtaatggtattttaaaatttgtttctttctgactatgcacagttgttcattctcctgtagctcccagcctgtgtgctgtaaacctagatccagagctgttgggtgtgtcctgtctcactgttgggaatttgaattactgcatttagatactgggttgctgagctagacacattggacatgtgatttttttttttaaattaaagtacagtctgtcatttgctccttttttttataattttcttccttagataaactcgggtaagttttggatgaagtctttcatgtgcattacagaacaagcactgtgtgtagacacggtctgctgcccagtacagtcctcatcatttgcgttgtgcactgagactgagcaggaaagctgtactgtgtgctcttgttctgttattcttgctcacaaaacaaatattcaaagattttgaagagcactgttaggaggatgaagaacatattttctttgctaaagtaaacaccatctttcatatttcagtcagttatcccccattaaaggaaatgcttcacttatagtgtaaaataggcatgccaaagcaaggacctatcctcagatgggctgatagtaactgccaacttagtttcttttccttccttccttctttccttccttccttccttccttccttccttcctttctttctttctttctttcattcattctttttttgtataaattttatttaaaataatcttcttttacatatcaatcccatttccctctccttaccatgctccccaccaaccccccccccatcctatctcctatccactccccagggtgggtaaggccttccatgagggatcatcaaagtctgtcaagtcatttgtgggagggcctagggcctcccccatgtatctaagctgagagagtatccctccatggggaatgtgctccctgaagtccattcgtacactagggataaataccgtttccactttcagaagccacatagatccatcatttagcatttaataaagcattgactatgtctaaaattcgatgtcagaaacttggtcagggtatactatgctctttttaaaatatcttattccaaagaggtccagagatggcttggtggttaggagcacttgctgccctagcagaagactgggatttgattgccagaaccgtctgggtatcaggctctctctctctctctctctctctctctctctcnnnnnnnnnnacacacacacacacacacacacacacacacacacacacacacacacacacacacacgcaagtaaaacactggtaacacatacagaaaaaacattcattcaaagaaatgttattctgtctgcagtcttttaatgtctcagacatatagtcagctcaatactttctgatattgtatatattatggtcattttatttttaaagaaatagtgcaaaacagcaggtgaaagaggcctataaactgggaaatgagtgctggctctgtgttcatatgttgatcatctccctgccactccaacctctgacctgcttcactcagtagggacagcaggcaatctttgctccctcttcctatttctggagaggctccctttgcctttctgtttattttacaattcttagtgtaagacaaaattggaagcatggattaggctgctgaaggttttttatttaaatcattctgtggtttattttgtcacaattagataagcagtcaaattaatcttataaaatgtgtaagctgtttttaatagctattttgtcttttcagccaaagatgtgacttacatatgccccttcactggtgctgtacgaggaacactaactgtcacaaactacagattatatttcaagagcatggaacgggtgaggcttatgagtttggcttttgcctgtacatttgcttggtgtttggatgggtttgctcacttctgatttagtttttattattgagacaaagtcttatctgtgtaaccatggctgtactggaacatggtatgtagatctcaaagatctgcctgcctcagcctacaagtgctggggctaaaagtatgccctaccatacccaattaattctgggtaatttttgattcaagaatttctggttaagattttaccagtttggggggatgagtgttggagattgattgaacccagcgtcctgtcctgttggtgttattaaagcacttaacagttttttagaagttgtgtgttttcttttcatcttgcaggaccccccatttgttctagatgcttctcttggagtgataagtagagtagaaaaaattggtggtgcatctagccgtggtgaaaactcttatggcctggagaccgtgtgcaaggtaaattttacaacactgtgtggttgtatttactttggaaagctattaagtagaacctatacttggaaactggtacaagtcagtggactgcatactagaaatgtattctcatagaagcaaatgttttttgctattcacacattggtttgggctgagccagctgttaagacttcctgaagtggaagaacttcaggcagtttggtcctgtctgtctagcagaagagacataacaaagtgagctcctggaagcagtaataaatcagaaaatgatctctatatgcaagtgaaatgtagtaacagctgatcgtgttttttatttttaaaactcaagttctggtaattaaactaaggttcttgtgcttgtgaggcaagcattttgcctactgaaccatctctcctgcctaggaaaggacaaatgttgatagtgtgtattcgtcagttatttacatccccttgggccctactaagcctagacacacaggtctagattctgtgccatgtagtggagtactttgtgtttcttctgctcacagagaatcattgctactttgtgtcctggaacaattgttttgtatcctatatgtagagctttacctttactcaacatttccaagtaatttcatttcttcactaaaaaggaacaaagtgatttaactggatactgtatcttttctaggatatcaggaatttacgatttgctcataaaccagaggggcgaacaagaagatccatatttgagaatctaatgaaatatgcatttcctgtgtctaatggcttggtaaagtttctctctaacctgtaatgtaattattagtgtgatcaaactcaactaggttgtccagatcctcccctttgtgttcctgctttggcacttagccagaggctagcttgtgcccaaagtcaatttcagtaatgacattctataattatgttgactttggaggagggggaaaaattggagattgaactcagggcttcacacatgctagggaagtgctataccacagagtggttttgtttatttatgtgtctttatttgagacagggtcttttgaagttgtgtgggctggctactcctgcctcaggttcaggaggtctggactacagcctgtctctcatcttggctgtcttagttggtgtctatccctgtgaaactttgtagaccaggctggcctcgaactcaaagagatctggctacctctgtgccttccaagtgcacctacaattaagtagagtagaaaattccacctacaattaaaggtgtaaaggtgtgcgccaccaccgtcctactgaccacagcaactctttataaaggaaaacattgcattgtggtggcttaagttcagagatttagtccattatcattgtggtaggaagcaaggcagcatgcatataaacaatgtgctagagaagcagctgagtgctcttatatcttgactaccaggcaacaggaagtggtctgtgtcacagggtgtgacttgagcatatatgagacctcaaagccggcctccacatatcctgtaacaagaccacgcctactccaatgaagctacacctcctaatagtgctactcccattagaagccattttctttcaaactaccatatcagcttatataatatttttctttaggatgtttccatgattaaaagctttatgtagtcttcattagggtttgcaatcttcctggataggaactggcattaagactggaaatatgggtcagttattagttcagcagtattgtgacagtgataggttccctcatctgtatgatagaatttcacctaatgtcagccaacttcattcccatatgaaaatcaggatggataaggcagataatctattaacttaatactgggtttctcacttcagttgcaatttttttcttaaatactacagacttttctagtcgaatttaaaaaaaaagcttttatacactaaagtataaaaaggtcccttagtgtattagaacatacaatattacagagccactcagctgctgctgctctgtgttggaccagttatttctgttggaaagtgcatttttggagatgtcatttattacttagaattaaacctacaaaaactgccaaaatattttaaagtaataggttagcatttggaaaattttatgagtgggtctttgagcttttctgtacttcttaaaatatataaaatacttagtattgtaaattaaacagtaatttcagtcataaaactaaaaccattttaaaggaggaatttaaaatactcttgcagataagctaattaaaacataagtaattataaccctttaaggacatatttctgattgattgctttcttaaatgtctttttttaacttgtttattttgtagcctctgtttgcttttgagtataaagaagtattccctgaaaatgggtggaaattgtatgacccccttctagagtatcgaaggcaggtatgtgcttttctgttctagctttcatgctctgtattattttcattacagacagatcagagtcaggagttctttcagtgtctcttcctttttggtttaagtgaaggctaaccctggttcgcttggcttttcctttgaattgctttccagaatacactagtgatctacaaatctttgcttatctaggagtttgtctgaaaaatgtttgctctgtaaagatgtaaacagaatgagtatgtgtaaaatttaatgttcttatatgccttaatattattcactcagttttttcttattaggcatcctataatttaattatgaaaaaaataactattgattctaatttagctctgcaaaattttgggttttactcttcacagaggatagagtaacactttcccttgtgctaagggcagcattgacttaatttggtcagtacccatttattttaacgtacgcgcgcgcgcgtgcgcgagagcacgtgtgtgtggtgtgtgtgtgtgtgtgtgtgtgtgtgtgtggtcagaacccatagattttactgtcagcgtgcatgaatgtgtgtatgcacacatgtatgttgtgcctgtttgtatttgcttgcatgttttccatgcactagggattgaattcatggcctcatacatgtgagacaaatactctactactgagctatatctccatttttcatgtagatcaaagtttaattcctattaatagcttctcaaatattttccactcaactttgattcatttaagcttgaagagtatttattaatgccatgtgtgtcctttctgcttttctctactggagtcaggtgtttggtatttgttattgcttatgctccagtagagagggtactggccagttttctcactgctgtgttatcaggatgtagcagtgcctgacatgtcatagacaagtgtttgttgaatgattgaatgcatgaggctaagggaagagtttgcttacagtgtgtgctatctatgttaactaacaaatttttgcatactggtttatttaccctgtggtacttaagcacatgatgtaaaggtactaaatattatctgcatagcaagagtaaactgaggcatagggtcattaagtaatctgtccatggtaacatagctattaatgtggaagttgggaattgaatttgcaaaattatatttcagtaggtaagttagtattagtcagataccaacctgtagagctaatagatgagttaatctggaagatgactgtaaagaagttcatacatagacatggagtactacagtagagcatcagacccacaaagtcttaaaagtggctagaagaaataattctgttgggctggtgagatggcattaagcacacaagcctggagacttgagtttaatcccccaaatgcaaatcaagcacacagctgttctctggccttgacaggtgggctgcagtacccgcctttacccttctttatgtccattccctaccaataataataaattatttctttttattactgtcttttaaagaaaaaatttggctagcagtgtctgaggctatggaaatacacagcatatggcaattgataattcaggtgtcaacccaccagattctgatggagaaaatcttgtttatcaaggcttacagggggaccactgactctgaaaatgggttgtctatatctgtaatttttctcatgtgcacttaatttctttcctaagaatagctttggatgttttcccactgctcgtgtgtttgtcttgtaagaatattctatctattgtgggtggtcaggaggatgacttttcatttagctatataattttgatatatagaaaatatactaggacatgcttcctaactagatatatttgtctaacaaggactatagacacttaaaagcctgctttgttcatttttctctgactaactacacacagttagcttactttcatctcagagcaagttcaaaacaactaggctaaaagctttttgtcaatagatcataagtttaaaactttatagctatgcacaaggtcagagtcgaagatgtctgacccggttgctgcgcagagcaccttaggaagggcatgaaggttctttgcttgccaatctgttaacaatggacctgtgtctcagggtttgtcactgagcactgtgctccccaccccccactcccaatctggtcatggtcttggtcctgtgaccttgggaccttgtgtttccatgcaatggctcagctccttattgcttactctaggaatgtgtttttgaccaatgaaaggtaactcttggaagtttttttttaatcgtttcaaggctcctgtaaggagaagagtttttagaatagaagaggaagctggaggaagaagctaggaggaattgcaaatagacaggagaattagaaacagaagaatagagagactgattcagaaaagcacataatgaaagaattctttcaccctcagatatcctaagtcctccaattgctgttacatccatcctgaaccctgagaagagggtcttggggctgggcaccaaaggctctcattatggcaaattgtttttcaaaagtgaaagtggaggctagaggatagtgtgacctgattgtacaatgaaatttgctggcttaattctttatcagtaattatatcttgtagaaatggaagggaaataaaatcatctcctgacagagtactaatgaccagagaaggttctagagaatgtatactatgtatataccacagcaaatcagttaccttattactacctgatggctcttttgagaataggacactgctgtctttctgttccctttccctcccccatctaggttcacaccctctgatagaatttaatgaactaataggctactaaacattacatctgatgcccccccctgaaaaaatgcagatcctcccattaaaatatgtgtcttcctaaaagtctggccacatcaccatttgagcagttttaagatatgagaactggagataggtgagtggcttactgtcctggtgtctattttagctgacagtttgtctcttgttttatgtcatgtgtagaaatgaacgctatgaactttgtgacacatatcctgccctcttggttgtgccagcaaacattcctgatgaggagctaaaaagagtagcatctttcaggtcacggggccggatcccggtaagtaggctgagtgccttgagactctgtaggtacatttcagtacaggatgataatggccatagcatttatatgaggatatcagagactaaattaaactgtaaagttgaaacagagttgcctagttcctaactcaacatttgccctgtgtgttggttattctttatcttatatattctttagtcatggcaataaatgcttttttcttactgagtcaaagagtagaagactacaaattgatgatgtatgtatgactgtgtctcaaaagagcagatgaaataattttagaggcagaagcgtagaatccgagtcctttatagttttactgatatagtaataaaaaaaaacaagtggagtttgtttagctgttttattgtactttttctaagaaaagatttttcaataataagttttacaacagtatctaatttggaagtaggcaattctctacaaaacagttgactagaaagtatggtggcatattttcctggcatccagggccctcggcctgttctgccagaagtctgctctctaggagacttacaagcaggatagcaatatcaccatgttcctgtcattaaggttttatcatggattcatcctgaaagtcaagccacagtcactcgctgcagtcagcccatggtgggagtgagtgggaaacgcagcaaagaggatgagaagtaccttcaggccatcatggactccaatgcccagtctcacaaaatatttatatttgatgctcggccaagtgtcaatgctgttgccaataaggtgagggttgttttgttttttatttttagtaattatttgtcactctggtgttgctaaagccagctagatttgtctgtgctgttgcctggtaaaaagtggtcagaccctatggaggcagagagaggtcagactacactgaggaaatgatgatgatgatttccaagactgcatttcatttgtattatagaaaaattagttcatgcatttagctaagtagatgaagaaaatgttttaaaatgccccaaaacttggaacatcattaagttttgcttgtatttccaggcatatgtagttttctgtaaatatttgaagtgaaatggaataatttttgtaagttaacacattttatgtcactgaaaacttataatggtttcttaatgtctgataataatcacagtaaacattagactttttttgtcctcccattgtgagaggtgcttgagtgaccatccttaactcatggaggatatttctcattctgcatctgcatagtttgtttaaggccattgtgaactccaggtgtcctttgcaaatggcccttttaaaggaggtgagggaggaccatgatatcttaagtcattgcagtggtaaagcatagttgttggtttggttttttgttgttgttgttttttatcatttcttttttgtcagttaaactgatacccttcattggggtaaaaactacaaccaagttcattataaaagattttgtaatgcagaattgtttcattcaattagtattaaataatttgaatgctcaaaattacaggcagttttcaaaagcagactcacatcattgtgaacatcaaacaggcaccatccacagacatgttttatcataattttacattatactgtttaacacactgctcatcaccaatagtctttcttctttatgttattcttcttgatattttactgagtgtgatgcataaataaagcctgtaaccaggaagtcagatgttttctccaccaagtgctgattttcctccctaaattctgaccatgaataaaagtaaaaatcagacttagtcatctgtgagaaggaaaggcagcaactgtggtagggcaaagtgttgatgtcgtcaactctccctcctctacacctcattctggaaatctgcagcaagtataggaggagcagttttcacaccttgatgaattactgttgtaactgctcctgtggccaggatcccactgagccacctgtaccctaagggcagtcactttcttgctctgcactcctcacacatctttatgtatttcacaggtgtttacctctgcactctgcatgtcagctcatcttccagaatattttgttcagtgtcttaggattttgatctgtggtctccttttgcctatccagcttttcctttcatgtcacctgactctgtcacagtgtgggctgtttttattttgttcccaaatctctgaggtgaacgtgaggtttattcagatttaggttccatttgttctgtgggccactgctgactgttgaatctgttactttgattcacttgagctaaaatagtactttttaaaggtactgattgaattctttttgtaaagtgatgcttctcttacctttgattaatcaggataaatgcttcttaattctcagacatgagaggggctgcacaggtaggaatttatagagattagatagtgttggttgttttacacctactttaggccttagcacttggctatcaggatggaagggcccctcttagcttagggtgcatagcctctcactgtggagacaaggctagactgaaacgtgaagagatctgcctgcctctgcctggtgagttctgggtggggctaaaggttgagcctctgtggtaaggttactatacttctaagattaaagaagaaatgtgactttgtggacattcttctgactaaggtcatctgtgaccattgcagtctggtgccttccattcactgatggcagtcaacctttgggactattggtagtctgccctgtgcttgcctatacttggtagtttgagactcagtagagtagttaattaccaagtttagttttaaatgcttttcatcttttgctttactatctagttgctgtttaaaaaaaaaatacttaacggagatataactcagtgtactataagaaagtatccgttcctttagtgtattcacagcccatcgtagctatgagttctgtattatttccatcctcgttctgtagtgggtttctagagtaggtactgccatgctgtgggttgtagtatttcttcctgtttctgtgatgggctattgtagtagctactattaccatctcctgaaattcgttgcaacgaaattgctttgaaaatttctctatcctcaatcttacagttactttgttagttactttttatatcctggggcagaacagctgacaggactgctgtgagcatgtgccagttactcgctgaggcatgctgggagaaacctacgtcttctagctaggcctcacattgtaaacatctcccaacaatctccctaatagtactagcaactagggaccaagtatacaatataagcccatgggtgacatatgttcaaactataacacccattttcactcttcagaagtcatctttgttaacaagtattaccaacatttacttttgtaataatgttgaatacaaattactccatggactagaaatccgacaattttttaaattagtttggagttgaattcagaggtatcatagtcacgatcctattagtggagttgctctactgtactcccaatttgctttttgataaggcttcaagaagtgtgattttatgtatgagttaggcaagacagaagatttttttatgtactatatgtgaaacattctgatactgtcaacagatatgaagacatcaaaaatatagcttcccccatgggagtaggagctatgtaggttttgtataggcctatccctcaactaatcttcaccacatggcagagattatcttcatcctttttccagagcagtacctgtcatctcaagagcttctgaggatgtcctggcattttctaaatgtaaatccatcttcattgctttacggtttgacagaagatttttttaaacataaaatctaatattaaacttgggaaaattatgttctatttttcagctatagcttgtttggaaaagcatgcattttcttattttatagatttgaggatagtaaatgtcagtgggattctctgtttgtatgttaaatttaaaatgaatcagctgcttataatataagcaaactgaaagttaatcttgtcagtttgattgaaaagaggactattgtttctgtgagggcattttgagagataaaagctctgacctgcccaatgggttaatccatttttttatttacattttagattttgcaaagtttagtatatagcaggtagagcttagctgggagaaggggactacttggggtatacctttgagcggtggccttctgcccttcttgctactcttccctgtagcctggctgatatgtgtgaatgattttcctttgccatgttctttctccatgatgaacacactccagaaatgtggggcctacctgtggactgaaacctgtggaactgactgtgaagtaaatctccccaggaaatccttcctcaagtattggttcacagcaacagaactctaacttggagatcattatggctacaatgaatttgtttttctattattaactgaaatgatatgaaaaggaaaataagcttgggtggtctagaatgggactcttgcatgcagaaatgataatttgattatttcagtatgtttgaagggaagtctacataagaagttatagataggatttgatacacacaggaaaagttttctttacaatgctgaagtgctttgaaatgattcagaataaacaaactgatcacataggcttagcacagactccattttagaaatggtatgagtgtgtgtttattacaagtgaccctgagctactcctgctatccttatcctcagcaatgtccatcctattttagatagtttatggaactttgtaatggatgtcttcaaaagatggctactcattcatttatgattttctgtgatttgtgcccttttgcaggcaaaagggggaggttatgaaagtgaagatgcctatcaaaatgcagaacttgtttttttggatattcacaatattcatgttatgagagaatcattacgaaagcttaaggagattgtgtaccccaacattgaggaaactcactggttgtctaatttggaatctacacactggctgggacacattcaagtgtgtatttgctactccttctcaaagcctccactcctttgcttgccttggctcttgtaactgaaatcagcannnnnnnnnnnnnnnnntggagccagtggctctgtgcacactcgggtctgaaggagctgcatcctatgctgtgcatgggtttctgctgcctcttgttttcctcttccatctgaattctgtccatactcaagagacagtgtctttcacttctgacagtcttcgcacattgtatccatttccagtctcttaggttctcaacccctactcaacttatatgccattcttcatttatttgactgtttttgaaacaagttctcactctgaagtccaagcagccctccacctgtgactcctgggattataggcatgacccttggcatctgcatcctttttattgttgattgatgcttcttgccatgtgactgaggtagtttttttttttttggggggggggttcgagacagagtttctcgtgtagctttggagcctatcctggctctggctctgtagaccaggctggcctctgcctcctgagtgctgggattaaaggcatgtgccacctacacctggctgaggcagttctatgtaacagaactatattagtttcttttaagacgtgtttaacattttttattagactttcattttacaccttgtttccagctcattcttgcaggggctcttaggattgctgacaaggtagaatcagggaagacatctgtagtggtacactgcagtgatggctgggatcgcacagctcagctcacttccctggccatgctcatgctagacggatactatcgaacaattcgaggatttgaagtcctcgtggagaaagagtggctaagctttggacatcgattccaactagtaagtaaagaaccttcattttatcatgtgctcatgtgggcatgtacatttgtgtgcaggctaggggttgttggttttcttcctcagttactatctaccttactatttagagacacacggtccttcactgaacccagagttcacagctagccagcaaaactaagagatctgccatttctgcctgtccatgctaggactataggtatgcatattatgcctaacttttacttaggtgttgggaccaaactcagatcttggtgtttttgtggtaaatactcagattttggtgtttttgtagtaaatacttaatgatctatccagcacattcatttttaatgtttcacaaacatcttgtacgagagagaaaaaattggccatttatttagcagagtgaagtcatgagagcactgtatttggtaaagtgttagtatattcttaatgtattgccatctgaacccaggttggtttaggcatatgaccttgtctcttctgtggtttctacctagaaattcagctgttactaatggccatggtgctgtccctccaaatggagcataaagtattgctagctttccctttggccttgaatgaaaaggacagtggttcagttactaattcagttacatataatgttgctaatgtagttcagggtctaaaaaattattaactaaaataatagagtaaaaaaatctggggtttcaatggtcaagaacatttgctcttgtggagggtttgagctcgtttcccagggctcagattaggcagcttccaagcgcttgtaacgagagctagaggatttggcactagccttttggtgtcagtcttcatgtgcacatactcatgtacatagaaataaaaattgaacatctttagactaaaatctacctccctagttattctttccataaatttggaaagttttacagattctcttaaggaaattgcaaaattttgagccctgtgttgttccaagttttttatttagaacttctggttaaacacagggatgtatacaacctagagaagcactctaccactttaaaagaaagagaagttttattttgagacatgggatcttgccaagtttccaaggctgacccctaaatgcagcttacagttccacttgtgatcttctagcctcagtgtctgagcaactagagttttctgtctgtcccactgggactggttttttgttgttttttgttttgtgtatttctaaattaggtggtgctgaaaacgtgttgttagttggattaaaatgtttatccatgaattcaaagtatatacctaaaacatctaagttgtacctacaaaattagtgtttagattcatgtccagaaataagcatacaccccttcttgaggccagcagtcccacttaagactcctgctggaatttccttgtgataatgaaatgaagtttcctgcttcctattgttccaaccctccctctggagacaaatgaaaagtgttccttttatttttcagatatttgaccatagctgtctccccacatcacccataagcttcagcttttccgaatgaacatccttgatgggctttgtctccccatcccagttgtccaccagtattactaatggctctctacaagtgtggtacccatagcttctctcagttctttagtgaaatggaattatgtcctccttgaaaagagaaaacataattgcctttgcttccttgtactatgctttggactcagggcattcttcagtgggatgttaaatctgctcaaggctgtattggaatcaggaaacatgggaacactttaccttgtggatctctgtcttcctcatgttatccatctgtgttattgtattggaatcagagtgaacactggggtcctgttcccaggaaggagaagtaggataagcagatgtctgggttaagaatgagtaataaccaaggcaggaatctggagtctagaggagggagaagccagagcattagaggcctggaaggcactgaggagatgggtcctggcatctgcataggtgctctttaatattattagtctttccttcgaaacactgtttactagcagtgtttataggtaattttaaagaactagaacttgaaattggttgcctctttttgaatgtcaactgtcaagcaaaactaggcagctgaggcatctccctcagtgcctcacactttcccattttttaagaaattaaaaaaatttcttccttaaaagtgtcatgtgttgctggggcagtggtggcgcgcgcctttaatcccagcactcagaggcagaggcaggtggatctctgagtttgaggccagcctggtctacagagtgagttccaggatgccaggactatttcacagagaaaccctgtttcaacccccccccccaaaaaaaatgtcatgtgtttcaaaaccataaactccttgattgcttgctctggtcacccattttccattctttctagttgcactattaatgggctcctttttcttttttaaaataaaaaccagtcaagaaggcatgctactgacaatctgttgaagtttatgaggaaaaccttatgtaggtagtctcataggagcccatttagagaattatggttgttttgaaatctgttaaaatgtagcaaataataagtttgttgtagaatccagaaaaagacaaaacaaaacatatctttgtcttgtctcccctgaattcttttagtctcctacattttctatagttttttgtaacagtatatattggttatgtgaaacacactaactcatgattatacagagcctcctgatttattgtttcattctactgattcagaggcatatgtatgtggttttatcagataagtggataaggcaaaagtttactgaaactctgatcttcaaattattagcaccaaatactatccatagtcttttacattaaggaaaacaaactgtatatttttgaaaaaaatccatcacatattcaagtcttatgagagccatagttaacattaaaatgttatatccttccattctgatgcataggataatcgaaaattgtataccttttccattttgtcatgagattaaaatgtttactcatagataagacttgttaatttttcttgctttgccaataataccctctaagaaaacttgattttctaccttcagttgtgagcatctggcaggatagaatacatacagtctactgtggcccatcaccacagcctagcttgacaaccaacagcagtatgcatttgcacgagtaccagtgctactcactgggaaaggtgaaccaaaacaacatcttagcagtatgactgtattttttttttttttttacatggaaacctgccccagaacttttatgccccactttttaaatgaatccctgctttgggatttttcagttgcatggttgggaacccatttgtgtgaaaaacagatccaagtacttctgaaagatcttgagatttgtgctaatgtagctatcttcttaggaggtgctttttgtcccagtgacctttcataacgaatatcttgtcataggaagttaaatctctagaacaaaactctgggctctaaggctcctctgttgttttagaatctgggtttcatttaagtagcaatgtgacagttttgaggaaattaaaaatactgaccaaattatacttttagaaaataagattctactaagtaaaatatcttacatgtgacatttcattctttgcttcagagagttggccatggagataagaaccatgcagatgcagacagatcacctgttttccttcaatttattgactgtgtctggcagatgacaagacaggtaacgcatcatctattaatacccttctcacacatctctaagctcaaagtggggaaacttgatcactgtttggcttgtgattcttgggtagaattcccagtgataacagctgttactgttgggcattaaaactttttagaagttttaatatgaataaagagcttgatactagtagcatcgcaaccaggggaactgataaaaatgaagattcctcctgtataataatagtcctttgctcactgaaagctctgtatactttgctaaggaagatgaagaaacgagctacattgattccagtcggaaccagacactattttgagtccttttagctgttttaaagaaagaagtatttggacagagtatcaaggcagcgatcacttggccccttctcaatgtggagctgttagaaccctgtaacagcctttgaagtagttgggtaaactgaccagtcttgaaaggtactagaagataacacttggttttacaataggaaacggggctgcagggtcttgaaaatggtttcaggagtagggttaagcctgaaggcatagttcttgttactggagacataccagtaagataaataaggcaagaatttgacccagctgtctgattggtaggatccaccaaggtcactaggtataacctgggagctgtgactgactagagtgctgtttgggtaggatggggagacattttttagaaatttaattctaaactaagaagggggaaaaaaaaaaccagaagttgaaagttaatttaatcagcattttaattacttagcaaaacaagcattagcagtaaactacatgtctccatagattttagttgacaggaactttttctaaaataccaagacagtattttccaggttgttgtggaatttttcacaaactattcagatttacaagtatgtttctgaatgattttgaaataataacagggtggattaaattaagccttttactaccttttggtggtctgtaatttaattcttcctttggtcctccaaaattggattgtataaaattaagatacccactgaagcttgtataggggtgaattctgtgttggactgatgttgccaattgtgaattacaaggacctgttcttcaacaagataaataggttgacttgtaagttgactgcatagctgcacagttacttacttctgtgtatatagtgatggcatttgccaaacacatttgttatttttaattcttagaaataagatgtgatgaaaactaataaacatggaagaccagactcatcagaattgctccaagtcataagtcagtggctggcaactatagggtcaaggcagagcagacacaaaaccagcattaagtccactcaatacttgctgcatgagagaaactctaccttgcaaaggaaaacatgccacaaatgcttaggtagtttcaaatctgtctaagtattattacagaggatctactcacgacagggataattatccctgaaaaatgtcttaaatttgtgtgctcaattttgcagttccctactgcgtttgaattcaatgaatatttcctcattaccatcctggaccacttgtacagctgtttatttgggacattcctctgtaacagcgaacagcagagggggaaggaggtaaggtatagctctggctcttactctggtatttggttttttgtatctcacaagatatactagtatatacttccatccgtgaagtgtgggggtgagaaaatcacacctataatcccagatactccagagggtaaggtagaaggatcacaaatctgaggccagcctttttaaacagatcccatctcaaaagacgtctgaagaaaagaggatgctggagatgtagagttcagtgatggactgcttgcctagtgctgtgaagtgctgggttcaatcctgctacaacaaaaacaaacaaaagaaccactctgtagaagcatcactgttggtggtactggtagttccctccatgcacatcaatgttcatcctaaaaactgtcagaaaataagggtactcacactgaaaagccttgctaccaggttcagatgttactcactaatatgcatgttcattcttatttctgtaaagcaggcaagtagatgaaaattaagtgcttcttagactgtactttgcaggtattgtatcttacagtgaatgtatttctgtgcatggtaggctttccatatgttacgtggtactagataatcaccaatagagcactgcagtgttctaattactatcacttttgagaaacccccttgatttaagtcttagctgtaatttaaataccataagccctcttttaaagtggtaatttaatggtatagccacagaattggaaccatcaaaatttagagcattttcatcacaccagtcacccatacctgtctatccacattctctcaggtttgggtagatactaacctggtttctcaggaattatgcactgtcattcaccatgtgaaatttgtgtctagctccttgcattatcttttcaacatttatgtcatagtactttcttttcttcatggtcaaataatcttccattgtctcaaatcaatcttcctttgggttctttattttggttgttgtgaatagtattgctttaaacatatggagcacttttattttttgtgtatgggcatgtgtgtttgtgcatgggagaccagagaggatattagatgccctgcagctaatgttttgagctacccaatgtggataaattttgatcctatctccagcactgaggcactttatgtaccagtgtttttcaatctgcaaatacaactgttgggcatttcatgttaactgtgttcatttccatcaaagtaggtctattagcagttagtttcctctattgttgactttaataatcacacagtacacaagtactgctgatgtggtggggaatctttaccagttttttcctcttgcagaatcttcctaagaggacagtgtcattatggtcctacataaacagccagctggaagatttcaccaatcctctctatggaagctactccaatcatgtcctttacccagtagccagcatgcgccaccttgaactctgggtaggatattacataaggtggaacccccgaatgaaaccacaggtacagatctacaatatacagtataactctactaggtctgtcacactctctctgtccattagtaattacaatccacagagtcacagaagcactgcataagacaggagactttcccaagtgcacacatcctgaagaaaataactttataaaagcctaaaaacagcaggtccacagttctgaagagttttagctagatgatgtatttgtaaagtagcatcttccagaaacgtaaagacattgaaagatcagtgatgacaataaaaccttgctttaattccactgaggaactcggtgtcacaaagccagacgaatggttaagatcttgtttggctgggattcctattacagtaattttgtttgctcttgcaggaacccatccacaacagatacaaagaacttcttgccaaaagagcagagcttcagagaaaagtagaagaacttcaaagagaaatttccaaccgctcaacctcctcctcagagagagccagctctcctgcacagtgtgtgactcctgttcaaactgttgtatgaaaggactattaggtcaagggcctcactgccaggaacttgacattacagcaccttacgggtagaaagccttccatgtttttaaacccatctatgggagaaaccttcagatgctgtatttatttcaagtctctcttagatgagtttggaaatgtctggtgcaggtgacaatggaaatcatttcatttgtaattaaagtatgacactaacttaagtcacccaaagaatactaaagtactggagtcctatttccacagtggggacacgtttttaattttaaaatgtcttaaaaaccaagcacctggtaagatctctaggtgggagaaaagaaagagcagctgttctaatacccaagagcatatgtctgggccttcatgtaaatgtcagatcaaattactcccttctcagatttctcaatttttgtggtatttaacagtaaaaaccattgttttgagattattactgcatatcaatagttaaaaattgctgctgacattgtaactagggtattttcaacagcagttaggaaatgatgccttatatatgtgctttggggggatgaggggacaaagcagtatctgtcatccaggaattcaaagaacattccacacccttcagactaatttacatttgtgtgttaatcgctaacatcacagaagacattttagaaactattactctattttatcttagtgataattggcaagttttaaagtctgactttagtgctatgtttaaatttcacatgaacagtttaccaaagaacacactgcatgtaaggaattacaatctaagtgccagcaagtaaagccttgtttctctattcacctgagttgggtgctggtgtgaacaactgacctcctggtatccattttactctgtataagagccatatgtaatgtactgtaacaaaggagcttattaccacttggtcttttaattaaatgacttcaaactttgtccttgtccacagttgtctaaagtatctaccccagccccactccctaaatgttacctagaaatgttcaatttgagcccacctgtccttgacacctaaatcaaactataaaaataaccctaacctcagtcactagttcattattttctgaactgtcattgtattgttgatgctggaattagtacaatgcatacatgcatagaagtctccctatccctctttcttttatttatttttgcttgtttgttgaatctagagcctcacacttgccaggcaagtgcattcccagtattaacaaaactgatggcaaatgatttggtttgatataaaattataagaaaaattttaggaggtatttatgttactaacagtactcaaaataagtttttgagtagtagtttgtactttttttgtactttcgtcattgaaactgatatggtacaaagggatgccggcagaatccagacattaaagctgatcgtacaatcactcaaaaatcagaaggatcatgtttcccttcaaaaccttctgatggtcttctatgacctccaagaaatttcagtgtggtgtgtacacactaaaagcacttcatgtggaatccaactgcattcctggcactcctttcttattcagcataggatccacgttgacatcttgtacaaagtataaaggagcaagcgaacaagaaactgaaggagaatcaaaacccaaagccctaggatccagctagagataggtaagattgagcatctttcaattactatctaattaggagttggagccattgccactcaaatgacagttatagagtttaatgttctaatattcaaacaagttaacacaagtgtagttagttgaactggtggtcgaaatataatatttaccatgtcatcagagcagtttctcaccttcctggggtctatggactcactgctgtcaattcattgttgctgcaaacctgcttgtcagaaaattgcacacacaagtaaagtttatatacaatttcaggaggtttataaatctcaaatctgtaagaactctgagaatccttaactagaaaattgtagcatgatcagttcatgctagtaagctataatccataacctccacctcaattcctttagtatatggctggcatgttcatcagcctatctgaatcactcaaccaggcacactgagcttagatcttgaaaagcaggagaatgataaacatgcactgaagactctctcaatcaggatactaatatgcactcttgagattgtgcaacaaataaagcctttgttagctggctaatagaataagttttaaaattgctttattgatttcagtaccaaatttataaagtttaacatgtcaatctattcaaaattataatttacattgacataatgatagttgtctgtgctcaacacacacactacccttattctgtatgctaaaagcatggggttcaagattaaaaaccagtgcttaattgagtaacatgattacaaaaaattgcagatgtgtacatttcacaaccttccccccttctcctaattctttatttcaaaagttcattgatttcattaacaactgtctttagttttatgaagatgttgttagatatttcatggataacttaaaatgtttgggtctttaagagtgacttaatgcttatcaacatctgaaataaccaaaaaccagaacaaaacaaagtcctcttaaatatataaatatttaaatacagaaatcctctatcagtagttgaaaacagtacatttaatggtcatctggagaggggaaagtagaggtcacttcatgcctggggaagatttaaaaatgagacttttcaagcactgactacggggacagcctcattctgaattttcaaacccaatttacatatagtcctactttaaaaaaacacccacaagtaaaaacctggtcatttgtttacaaagtgcagtatatgagtatagcaaattcaaacagtacaagcctctcatggtgtaaaactccatttccacgtagttgtgctgcatgacacaagagactgtaatgaagcttgggcccctggacacctgctagtaatggcaacattagcaagcatgaaacctggaaagtcttattgttattgtccaataaggtatatcgtttatgatctggtgtcagtaatcccaacacagattactgctttgcagtgaattctgtatggtttgcatgtccttcaataactgaagatttttcctgcttttttctccaggtctctgtttggcaaaatccttcttacttgtggtccttgtgactccaggtgaccgattgctgctgtttccttcttcatcaagagtctttttgttaggttttaattccttcttctgcttatctatgttttgtttctccagctatccaaataatcaaggcagggaaaaaaatagaattcaataaaaaatattttcttttagctcaagtactttgtttttgacacagggtcttcctatatacagtcttaaattcttgatcctcctgcctcaacctcctgagtataccaataattaatcttctaacactcaaatgatacattctaggtgttttttaaagcacataaatctgcagaaatcataaatcatttagtattcagtgcttaagtatgtaaaaacacatagactaaaataaaaggtgtacccacattaaataaatctactcggaactttcatctagagaaacagcccatgtatttgagattactatgaaacagaaccagaacaaaaggggagtccagttcctgggctgacagtaactggagtttggggagaagtgggcaaagctgaagtagtaggtttggtataagcaaacaaactactttttcacatatttaatctgacttactagttgacaactgaaaaactctaggtgtattttacacaatttaatttggtcaaactcaaccacttaaatttgtccagaagttttttattcataaggctaaggatattaaatatattcagtaaaaacatatatgaaacctaagtaaaaattaatacttctttaaaccatgtaacacagactgactgttaataaaaaagaaaaaaaaatcctcaggaacaacctagacaagtaaacacaccttagcatcatcaattaatatatatgaagggagaaagttaatcatcacaaacaagcgaagggaaggagttacctgtgcttggtatttccgcactttagttatctggttggcctttgcttccattcttcccactaatgcctccaattcacactccaagttgtctttcagttccacagttggtgactcctgtatgagtttagcaagctgctggtgatcactacacacaaaacacaagtggaacttccttaagtttcccatgtttaacaattatattctttaaatctcagcatgggaatttattaatattgataaataatatatatatgagacccattttgagacccattttgctttttaaaagaagtgctgctgcttccacggaacctgagttcagttccagcaaccacatcatataggtggctcacaaccaccaatgacccagctccaggatctctggtgtctcctgacctccttgggcatctgcacatgtgatatatacatacatgaaaagtcaatacaaaatgaaggtatatgcaagtattcttaattccagacaagtttgtgttcttccagggttgtaggcttgtaaatggagtttttaattggtctaaagtaataaccaggagtcagatatagaggacaatgctgagagaccagagagaaggagcaagccacagcacaccttacctctttagtgtctccacagacatgagaacgagtttctgtttctccctgcttatatcctgtttctgcccagctatctcaccttcatgtctgtctgtacatacctctatggttagctagtggcaagcttcattttctgaccttcagacagattttatttgtacaagcaagatatcactacataggttaacatacgtttatctactttttgctccctccatgaacactacatatgaataaattctactggatgacactggttttcaagcactgtcctaacttaccagttacatttagctaatccacaatacttttaaccttttgcatgatattagacatctaacaaaattagaaaaggaggtcttagacatgacatttacatttatttaactccgaacctgtgtagggattattgctcaacatctgttaacaaaatcaggattaataaggcagctaaaaaatgagattttagaaccaaatgcaattttaaattcaaaaactcaaaactcacaagctcatttgcccaaattcatcctgcagagtctctaagacatccgacagttcttcactgacactgccagagggaggtgtcactgacttcttactactcctgcaacctcgtgaacaggcttgctttgccaaggggacactgttaacaactcgatcattgcacaaagctttactgtggtgcttcatcagatgcaagacatgttgaacgttggctaccacggcatggctgggactggtggactaaagagaaaagttaaacaagcaatatcctctattcccgttttctagtttttaacctgggcatagtaaaccacctgtaaaatctccaaaccagcaaccactcatccaccctgtgtcatatacttagtctaacatcatataaacgtggatgtgttggtgcacatctgtaattccagcacttgggaggtagaggcaagagaagaccaaaaactgttcatcctctgctacagtggggttcaagacctcatctaaaaccaaacagaccaacaccactaaaaacaaaatagccaactggccttcctgcctcatccttgtgttcttagctccagtcctacaattattctacctgaaatccagtgttgtgcccctataagtgtagaacacaaccacacttctgcttaacctctacagtctcttaatcatgtgagcaaattttatttgcaggtgacatttctttggtgaagcaactttcttaccctaccttaaagactagtccaaatataccatttctaaaagcctgcgaaattaactactccacttctcagcacactgacaatttttacatctgtctgtctttgtttatcacaacatattctacgtgtctgcatgtcttttacctactcacttgatcttctaggtcctagaacagtggttctcaaccatcctaatgctgcaaccctttcatataataataaaattatttgattgctactttataattttgctactgctatgaatcgtgatgtaattaccagtttttgtaaatatctgcacaatgcttgagtaataggaaacactgaagtgtatctgccacatcataaacagaagaataaagcctgatacccgtctcaagcttcttgttttcaatgggaaataacaatctcaatagttggctgggcttgttgagctccataagctcagcagaaaacttgcttaaaatgcagacttgtgggaagaacctaagactcaatgtgttcatttcttacaaatgagtttgcatgaactttagtttgtcacactggaaaaagaattatacaccaaacctgagtgggataatcctaggaatgcaaaggtgatgaatgacaatcagaataatcattacttgccagtaacttaaacacacataatggccagtgtgtatactttaatatgcaatgagcaagttttgaaaatttttgttactgttacttttctgattcataatgtaattttatgtcagttgagtctagtaatgaaagatttgggcttttaagtcttacttttccagtgactcatttttattatatatgtaagcatggctctatagcagtaagtacttttaaaactggttattcaaaatctgtagaatgaaactcaattgctttaagcaactgtattttcttaaaacttttagaataacattttataaggaatatataaaagaacttcaaaaggagttcacactgaaaagctgagtactgtcctttgtgagtaaaggcttcaatgagaattaccaaagacaacaacatgggtatgatgagactacagacaggacaaagaatgaagactgtcaggtggacaagggtaaatgtctcactacaaatttaaaaatcctatttagggacagcgtgatgactcagtatgtaaaagcactcttgctgtataagcctgatgacccgagttctatctctagaacccattgtagaaagagagaactcccttcaagttgtaccttgacctctccacatgcattggtgccccctcattttttcacaatgaaaacaatgtttttaataaacacactaatcaaaatataacaaaaaataacttcacaaccatacttatagaggcttatacaaagtcaggagaaaacttgttccttgagttgattttataaatagtaggctgtgccttctaaaaggttttcctagagccaggtatggtggttcatacctataatcccagaagtgatgaggcagaaggattttttttttttaaagttcaaattctgcttataacccctaaaatgtgttctaaagactgaaacaggctggagatggctcagcagttaagaacacaggctgatcttccattggaattccaggttcaatttccaacacccacatggcagctgactatcatctagagcactagtcctaggggatcccataccctctactggcctctgtggacattaaacagatggtacacagacatataggttggcaaaacacccatatacataaaagaaaaaaaaaaagacattgaagtaatttaaaaataagtatcaatagctataactcacctttccagcaacaaagggcatatcgcctaagcacaatctgtaatgtggctgtgcaccaaaatagttcctaggacctttctagaaggagaaaaaaaaagccatttcatttaatttggtgaactaacccaagattccagctcaccgtgaaactactgattggataattagctacaccggtccctttttgctactgtgaccaaatagcaacaaggcttcaagaagctatttaagaagggatttacttggcccacagtttgataagatacaactcatcatggaaaacacatggcaacagtagtctgggttgggtggattttcattagactgtaccaaacagtagaaagcagagacagaggacaggaagtgggccaggctcagaatctcaaggcttgctttctagtgacttaatgggggccatttcacatttaaaccataacacttgtttatattgggactcataatattgcttggaaggcagagtactaacaaaacagttatcaagagttaagtagaggaacagtattcaagaagcattttaagagtcaaaggtagtgaacacagctgaatattcccagttgtatgttctttggtaattcccaatgctttcatatgggccctcactaccagggttaagtattcaaaagtaaaatttatttatcttcaggttttagtacagaaactaagaatgaaagactcactctcccaagatcctaataccacatggcttgagtgttgtttacacaaattattacacaaaattggtaagactaactagttcaattttcataccttttctggtggttttgactttttttttttaatttttctagtgttggttgcaacatacgaagaagttgtcttatcttcaaaaataagtctatttgcttctagaccagtctgcaannnnnnnnnnagaaaagttacaatccacatttgaggtgccatataaataagtctataactacaatggtagtcatctcactgaaagcaatggcatgactatacagtatgtcttcagtctctcatttatgtgaactgctgatctatagttgatcatgtcttgcttggaagcactgttctactactggtagttactctgcagattctacttcaggaatgaaatggaatgcatgtagctctaaactgactgtgctctatacagacaagtaagcaaaacacaatataaataaaaataaatcttgggggggggcagaggcggaagctgcaattttctctaaactatttttcaacagccccactctccaaaaatctgtgaaagtggttatctttctatacatcaaaaatagtctggagtttggtaaaaattctaatgaccagcttcctccccccaaagagtttaaaaattcacaatgagggaagtttcccagaaatcatgactgagttttcagaaacagcacagtaatgaatgaaatgcaaggaacactaaaaacatcccttcattatctcatgcactcttaggacagcatagtccctggcagtagaatgctaaactctccatcctcagaagcacgacacactagacataattccacagggtattatccttctggaatacttacactgtcaacaagtgtcaacagtaacaaatgaactacttaagggctacttttgatcacttcttgtttgatttccctagcactataaaatccaggatctggatggctaaatactctgttcagaacagcaagatagagaaatatcattattcaccacctgccttccactaccatagcgttcatcatcagaacttggtaagaattcatcaatcaatgaatttgtgaaactttctatttagcatataaggactatagactataatttaataaagaaaacctcatacttttgcaatgttacatgtaaggaatagagacatcttaaaatagttttccctaaagtcacaacaaattcactaaagatcaaaaatggttaagtgaccatttaactcagtaagcacacagagaaaagtaaatctataaatcatatcaggtttaataagaaataggcatatacaatcagtgactcaaagaagcaataaaagaaagagactgtagtatttgcatcggaagctgtgagaatgcaggacactagacagatgccataggcttaattgcttaattgcaaacttctcagatcaggacctttgggttactatgataaaagctacaaacataagcataatcttaaagaggatagaaaagagagactaggaaatatctgagcaaataaccatagagaaaagtgtgtcttgttaaaatacaaaataactttatcttacagagtctaagacttctgtgttggacatgtttttacctcacaggtttttattttatgtgcatggatttatgtattacaaaactgcctgcatttatgtacgtgcatgtgcctgggcccaaggattagaatactgtcagactctggaattggagttacagatggttgtaggccaccatgtgggttgctgagaagcagtcaggtccactgcaaggacaatcacatgctctgatctctgtaccatctctccagctccaacctcatgggttttaaaaatactaatccagacttcataatttgaaacatccaaagaactgctcaaattttactttgcaaagttacattcctaatttccaatactaagctatctcttgaggtctacatgtagatctggtgtgctcatatgtaacagttcaccactgaaacacttatttaactgttcaccattccacttacctctgctgcttgtgcctgcatacgcttcctttcctgctcttcttcatgaagtttagactccaactcttgcatctttttctagtaataagagtatcagagcagataatggttaaaagtatctacttgtagagttttaaggatagtcaaaataagcatgttagttcactctagtaatggtttgggccttgataatatccatgatactccaaatcaactaatagtaattagtgatgtagatatgatttaagtggccagagtatgggggaaaaatcccatggccaaagaacacagctttgtataaaggttaaaataacaaatacaaatctagatcttcactcagtagtattaaataactctcaagtaaaacacaattaaaagtaaaattagttcagaaaaaatttatatgatgcaagttttaagtatcaaaaccattttggctttcactgttttcaaaaagaactaccttatgtccagccaccaagactgcaaaatgtcaacattccatttcaaattattttcttcttaaagtctatgtgtaagaccattacattataaatatccatgtttatgaaaaaatagtgacaaccacagcacactacatcagtaagtaaaaaagtcatgttcactaacttctgcaaggacctgcatcgtagtgagtttgctgtattcctgttcaagaagatccagtttttccagctggctctgaacatggttttgatcatgttgccgttctttttctagtgaaacctgagaaatagcatcaaaatgcaatataatttgatgattaaaaagttgaaaacagcacacacccaacataatactatgtgtaatttgcctgtcctcctacagaccctctgcgggatatggaaaggaattctaggaatggaacactaagagaagatctcagggtaccaatcatctgtctgtctcattttgtatgtgtatgcatagcgtgccttttgatagcagaggacatcttttaagagctggtttcctctttttgatatgtggatcccagggatcaaacttgatctttcaggcctcaaagaaagtgcctttattcactaagccatctcagcaggattggaatattattctcagtatagtattttatcaagtataaggttttacataagggcatatacctttataacctaggatagaagatttactagacacaagcgacaaatatttccagtcagtctggtcccatttattaatctcttaataactataagaacttgaatgcatttatttccttttgaatacatgttctttttttccttcaaacttaggatgatttggaaagactgcccatatacttaaggataacagtctcagaataaacaaatcagaaaaaaatgggcaaaatagactaattggatatgtttggaaaagcccaacactaagtatctgaatatgccattgccatttcttcaaatgtccatgacagtggggaattatacaagagaactttgaataatgaaacaatccacgcaataacacagtgaagacatgtaaactgtgattaatcactggctcactggcacatctttcccaacactgctgtataactgcttaagccttaaattaggatcaagaattgacatggactagaaaatagtatttctcttttacaaccgtagattatctagcatttaagcatataaaaaaatcatattttgcataataaagttaaagtgtacatatgaaaaggatgaataaaaagtatactggacactgatgttgtatttcctctacaaatgtgtaagttacttaagtacaaagttgcaacaggagaaaagcattttgtttataaagtttagcaagatagtagcagggcacattaacaaaaacctagcaccagagaaagcctcagatgcaatccacagtatcacatacaccaagtgtagtggtatgtgcctataaactcagcactttggagatgaggtcagggagatgaaaagggccatgtcatgcctggataaaataataaaccagcctaggctcagagagaccctgtttcaataagcaaattaattataaggttttgttttttttttttaactgcaaggaattttacaaagcttagtgggtcgggggtacatatggttatttacacatttgataatgcagactccaaaacattaacatgactattttttagatttaagcacaagtctaccaagtacaagaatcctacatagtaaacagagccaatcaaactaccatctactacactaagccaaatcaattccagcatggagctttaacagcagtgccatcagcccatcagcctctctaaaaagaggtctgctaatcatctgtcaccattcttcatttcatctggaaggcaccatacctgcttttctaagacagatgtcctctccatttctgcgtgctttatcatatttcgcatgtattccaattgtttttctaacagattacatttattttctgcagctaacaactgagatgtcagttctaaaatgaacacacacaaaaaaagtagtaatcagctaacccagaggattgtcccaacagcttgtaaataggaagtggactttacagtagtacatacatagagctagctaatcatagagctagaggtaaggtttgttgtagagtgcttgctcagtatgcctgagtactgcaaaacaaaacagctgccctccaaaaccgccagtcctcccagtagtctggaaacctctctggatgacttatgttcttcttatgctaagtcacatatgccacactatcaataagcactatgcatgatgtcacttgctcctcacaatacatctgattgtgatgtaattatgtaatgcttagagtcaccatcacaacataccaacgtgaaatctaaaataatttcacaatatttggatagatcctactttccttcttcaacaaaccttgattgtgttttgattcttcattctttgaattctctctctcttgtatctgttcatccaatactttcttatattcaattgtttccctagacaaggttttcacactttcttctgcctgaatcctttccagttccaagcgtcgaatcttctcttgaagattcttaagagcagaaaatatggctgcaaagtagaaaatgcacaccttaagtaatgtacatagaagctcaccaaaaaactttctgacagattctcattgtgtaccgcaaaatggtcattcaagagttaggttacaggtgtgagccatagagcccaggtctgaaaagaaaattttagaagacagacactagtcaagtgagagatcactcttagaaaacaaagcataatcttctaattaaaaagtcatcccaaggctttgtttcaaattctttaaaaggttctactagttactaagtaaaaactataaaaacccaccactggggtttaaaaaaacaaacaaccaaaacaccttggcttatcatacataaattcacaaccatcctgtggtgctttgagtaagaatggcccccctctgaggctaaagaaagctactaaggccaggcatgtgtcaggggtgtgcctgaacatagcaactcttataaaggaaagcattatgtgaaaatgtgaaggtgaaacctagattgtgttggactctccaagatgctggagatgccagagtcatgggacacctggcaaggaaagctgctacaggctgtggaaccagtccaaaagaaagcagtgtgctacagccaacaaagctgaaagaaactgtaaatctgaagatctcttggatatcacacaaaatgcagaagttggagtttgccatgctggttttcagtcttgctctggtctagtatttcctcactctattcccttccttcccttttggaatggtaatatatattctgtggcactgtattttggaagtatataacctgctttttaaatcttgattttacaaggggcacaatgaagagatttccatgagtctcagaagagactttaaactttgaatttttaaagggttgagagactattgggacttttgaagttggactaaaagcatttttgcaacatcacgatatggctacaagcttataagggccagggagtgtggtttgaataataatgcccccataggcttatatttgaatggttggtcaacagcactacttgctggaggacgtgtggccttgctgaaggatatgtgtatcactggtgggtaggctttgaggtttcagaagcccacaccaggtccagtgtctctctcttcctaccttcagatccagatacagaattcaaagatacttctccagcaccatgtctgcctccacactccctgctatgaactaaatgaactaaacctctgaaactataagtgacccagttaaatgttttcctttataagcatttccgtggtcatggtgtctcttcacagcaatacagcactggcagatactcccaaagtacattattaaatgctgttaaccactaggatgctgggtgatgcactgaaatcagagcagctatggctatccacagaagaccctcttaaaagatgtccaaacattccctcctggaagatgaggaggctcatacactaccaagcagctcagaaggaaggatacaaggcccttctccctagagattcctcagaggttgctaataactgtcagctcaggggagactcctccttagtcaactataagttgcccgtgttcatgtgaggaagctcagaaaactcactgcttcatcaaatttgtctttaatggaatcatctctttggtctattgttggcacctctctacgcaagcagacatttgttcatgtattcccagcaacaggcatacaacagatgcctcaaatctttcttgctgtgtgcacaccaaatgcataaataagccaaggtcaggggccaaccttggcttctactcctcagataatacagtgtttgttcaaccaaggtctttcacaactgaagctcactggttcggctatgttgggtggacagtgagtcccagagacctgtctgtctctggcacactactgcactaggaacaaggtgtcaaaaagcctggcttaaaaaaaaaaaaaaaaaaaaaaaaaaattattggaatggttttatcttttgacactttcacatatgtatgtaatataccttgatcatgttcacctacttccttccacagtcccccaggacctgacccccaaacacaatacaccccataatgtctgtcttctttacaaaaatgtaattcaaagtctagtaagtgctgtcaacctaatgactctgactttttaaaaagatacttatttatttaatgggtatgggtgttttgcctgtatgtacatctgtgtactatatgcatgcccaattcccagttgcccgaagagggtgtcagttgtgaactgccatgagagtgcaaggtcctcaaagcactaggtcctcttgaagagcatctctactgatgccatctctccagcccctgcctaacacttaggctcctgactgattctggaaatgacagactagtaataagtgactcaaagtattttagcttccatgactcggtggataatgtttagcaatcaatacaaaaagctctataaattcacacaaataaaggggaaaatatatgctgttctaatttcaaaacaaaagaggtcaaaactaagaattttaaactaaccagtaaacaaataacatttcctttgttacagttggttacctctgcttacctctgctgttgctttctggataggcaaatgtgggcttatttggggatcgtcgtagatcactattaaggaaaggcttatcagatggatataatacatatggagatggagaatgacgaatcatacttccattcgaccttgatggtttagttaggatgttctgaaaaagaaaataataaaattaccttttcaacatttaaagctaatactcatgactgagaaacactgtatgtttctctaaaagacaacagaaaaaaactgatttcacagaagaacccaaacattattgtcaagagatgaaaagccacatggcaaaaaaaaaaatccttctcacacaacctcactacaaatatttacacaagttaaatctttgttcagatcagaaacagatgcaatttgctgaattatattctatccccaataaacaaaatatatgccaaatatttataatgacccaaaactccctaaataaagcatgttcggctgggcgtcggtggtagcatgcctttaatcccagcacttgggaggcagaggcaggaggatctctgtgagttcgaggccagcctggtctccaaagggagtgccaggataggctccaaagctacacagagaaaccctgtctcgaaaaacaaaaaataaaaacaaaaaaacaacaaaagaaagcatgttcatatattaagaatttatacttagcaaaaaggggaaacaactataaaacatttggtcttatcacatattctcatgtaaaactatttttccacatataccatctgccacaaatctgtcaaatttggtgttaatttctacatgttacaaatttaatatagtgtacctctgaatgttaactgaagtttagtagtaggtgagtctgtggtgtaggaggacacttagataagtagtagttgagtttttggttcaggacacttaaataagagggaaataatgacaatgctaggagctaaggaagaagacaggatggctgccagctgttcagaattctcacacatctagttcccctttcagactgccacacaaattaggattttcaattttcttaagaacactattgccaaaatattatgtagtctgtgtaggtacaaaggaacgataagtattcacaacaataaaccacttcctgaataaacagaattatccaaataactacataataaagatttgtacttttgtgttaccgtaatacaaacttgagtggatttataagagcaattacaaaacacactgttgctgtgaaaattataagggggcaatgagcttaggaaattcggtaggtacaagtctcaaaaagagccctagtgcactacaagtgctaccatttcttagccttttgcctataatgagagctctatctgttgtaacatatgggctcagggagtaacatttatccttttagaagtctaatggcaaaaaaaaaaaaaaaaaaaaaaaaaaaaaaaaggcaagttggcatgaggtttttgaaggcaatttaaaaaacagttttaatttaatttttaaaaatgtaaaatatagtcaatgttattatatagcattagaattgtcccgaaccttgatctagcactgcatataattaacagagaacattggattttagtttctagctagaaactgctagaattccatcatttaacattcaaagtaagctaagagattttactgtagaattccccctcacaaaatcagcagaagcaacccaaaccaaataatcaactagttctaaatagaaaacccatgaattagctcttcaatctgccaaaactgcagcaaacaaaaaccttgtctgtctcagcttaccctcttaccctctcaaagtctcacctcctacaattaaacccctcttggtacctctcagtcccctgtccactacatttttcccagtgtcataaaaggataaaaacaaaacctcttcctgaactccaagactcctcaaccttagactgatttctgactttttaaaaaaaacacaatctagccagtggataaagctgcttgctgaacaaggttaatgacccaagccagctccccagaagccactaaggtggaaggaggcaatttcaaagctgtcgtctgacctccaggagcaaactgtggcatgtgcaccacacacacattctcatgtacacactaaaaaaactagaagcacggatcacagaaatcatttatctaagcattttactcagtggaggaagcaacagtgatttcccttcaatctcctaggtctcttcctcataaactccctggatcgctcctcccgcttttattaaatgttagagtttcccaaagtttgattcttaaggttccttttatgtctacattgattctctttttttaaagaaatctcatctactacaagcctcttaatttttatttgccagcagctttcaagttaaaatatggaactgagatctaaatctaaaactccaaactcacatcactgattacctacttggatgtcttatcaggcacctaaaatttaactccactacaaccaaattcttgtttagttgccaaatctgctcctcacacacaataccaaaacaactggcactgccatttatgaaactgctctgtacaaaaccattgtgtagagtcattttcattcactcaaatctaatctctctgcaaatcactcaggggtctttctctataacacatttagaatccctactactgcagatattgctgctgtttttttttttttaagtttgaatagctatgaaattctaactgttcttcacgcttaagtatgctctcccaaacagcttgctagtgatgatcctaaaaggagtgagagcttcaagttaatatttctaatcaaaactctcctatggttttccaaaacagagcacaatcccgaattcttaccataaaacctccacataatgtagtttctgttgtttcatttcctgacacacacatttgatactgtctctctaccaattttccaaaaatagggccaaaagaaaatagcagtgcacaaaatacatatactttcctattgaacaggctttaggatttcagttgtgcgtaccaaaaggactaaggattaactacatcttgtctcctatatagtttatgcacccagacacttgtttctgccagtcttacttttaccctttatcaatctggtccgtgaagaactcccaattgtttgcttctccactcctggatctttgtctgctagacgcattgtgctgaaaacttgagacagtctggccttgttagcacaggtggccacagaaagctgaaactgacattcttaagtgtgactgcactatctaacggcctctccctcatctgttatgaaattatcccgatattctgacttccctcattagtcaattcttacttgttctagttcctcttgcccaactctacctctccattacctgtttattactaaacccgccggtgtgcagcatttccagagtcctagtaatccgcaaagaagcgggaaggcgcgggctctggctgcaagggtcgccgcgtaacagtcaccgagaagcactgtagacaacgacgaaaatgcactcgggggcctcggacgcccnnnnnnnnnnnnnggcccccgccactcagcagacctgcacacctacctgttctccaaaggtatcggagcggggccgttacactcacgtgatcgacagagctttgttttcccaggcctgggagtgcagcagcccggccagagcagagctgcccggcgccggctgccaggccagcgaatgcaaggtgggagtggaggcgggcagggctgtggctccctccccaggacgcgggtgcagcctcccggagggaccgtgctccggaaccactgctagcgccaggtccgggatagccgggaaggcggggcgacccggagcgccgtcccggcccacctgggacccacttggacgggagcggagtaaaggcgagtgtacgttcaaacactccatcaggaccccagacactccagagaacgtccgcctaacgcgacgcctccccaggtgaagtaatggccttccggccaatgacaatccaaagtgggtggggcttaacggcatggtccaatggaaaccgtgggctgaaaaaaagcggcgcttcgtgacttatggccaatgggctcaggcgagccgcccacaccaggactggccgcggcttgtaggcgggacctcttccgaagcggatttcgcgcgctcagagcaccggtctactattggtggttattatcctctctttgtgggcgctccctgcgtaacccaggccaggggttgggcggagcttccgagtgacgtgaggatctttgtgaccaatcatcagccctctccttccactgggaggcagggcttcgtgtttgcactttcttgctaggatcccgaacccgaggctgcagagctgacggcatcctgcttcctgtcccggaaagcgaagcgactggtttgggaacagggtgctctgatttggagctcctcccatcccataaaagctgggacgctgtctgtgagcaactgtacaaaataacacatgtaacctcccctgggagtcagtcctgacagcttccttgatttaaatgttccatacccccccacacacatccaaaaaagataaaaatatctatggcctccctgtggaattacactgtgactggctgctgataggataagtcacccagttgtttattgacgtttcagacacttgactagattgatttctaccagaaaagtgacattgggtctgtgagataaaactgactaatgtattatcttattacaggaatgtcggattgcacatcctattgtaaaatgtacttactgcagatcagaagtaataagtgactcaaagtattttagcttccatgactcggtggataatgtttagcaatcaatacaagtcatatgttacagcgttttgagaaaatacttttgcttctgaaatttaaaattaagaacttatatacatagtatgagagaacacatttaaaagtcttggtatttttttagaactagacttcagtttgaacatgagaaaataggggataaattgatggaaggaaaatgtacacttttgccaacaatcaaaatacaattatttttaaacttcttaatggaaaatgctaatgaaccagaggaaagagctatagtgttaccagctgccttccaagactgaagtcactgacatttcagtgtgactaggacagatgtctttaacagaaaatcctcttttagaggacacacaagtaagtagctcaagagaacaaattatttttgtatgtgtggaaatcgcagtggggaacagctgactgagaaatgagaggccctgatgcatgaacgtgtgtatttatattggtaaggaaaagcttggaaccagagggaaagacatcaggtcttttgttttcttcccaaaattatacagtaagttggttgcctgtaaacacagtgtttagaggtagagacaggagaattaccacttagagacaaacctggacacatatcctgagaccttgatactcttgtctctaataataatatgaaaattttgtcttgaagagaaataagtttacaaacaactatcctaaaattagtatccatgcctttaagaagtacttgtgaattagtaagtaatctacaaatcttttgactttggccatttattggagatcaacatatgttacttagcctagacagccacataaccctaatcatctgggtgtaatttccttttcagcaaaactaacacaatctgtaagaagtgtgctcagaatgtcaagcaatttggaacagtaagtatgtttttcatttcatgggattattattggccaattatggttctttaggactttcttataaaacaatccagtgtctgtacttaagtctctcaacatagcaaaatagctcatggggaagaaaatctatatagtctcagatgggaaaatgaaaacaaattcaaaacaactgcatgcttacctgttatgtagtgaatttcaatgtgcattttgtgaaactatttcttaaagacacaattatagcaaattccttaatgtggtgagcttttatttacaatgttaacataatcaaacttttccctggtttctgcaactttttatatggcagtacagttcatgtgttcaaaactaatgacagtatcctggtacaaattggcccacatgtatgttgtagatgttaacataataatactgtttatgataggtcaaaaaaaaaagatatttgcagtatgcatttactgtgacaactacctacatgcagtgaaattctttttagttgaataaatgatacaacagttaagccagctagcatatcacaagttcatttcctcaaattatagagtcatgagacttttctgtgagtaactatctaacctcataagcaaattctgtgttatttaagtcctgagtgtgtttctcacaatggtcagattttttgagcatgcacagttgagctttctgactgtcgtaataaatgttagttgaatgaataggcccatatgtgactttgaacatgtatttggcaaaaacagatgtttttaacttaactttccttcattaactctgcaaataactaatactggatgtgtcttatataacaaagttttaaatgtctcaatgaaactgtttttattttgcagcccaagccttgtcaatactgtaacataattgcagcatttattggtaccaagtgtcagcgttgtacaaattcagaaaaaaaatatggaccacctcagacctgtgaacagtgcaaacagcaatgtgcttttgatcggaaggaggaaggaagaagaaaagtacgttttatttgttaagacttcttctagaaataaaataccagacaacttggcaattactatcagtatacctctaagacatttgtttctgatacctgaaagcggaagtggaagaatatatagcatatctgtctttgcaccatgcatggatttgtgttgatatgttaggatgactgcactttaaaaatcagttgtgctgattgtactgtatgcctgttgtcccagctccttaagggtgaagctggagggtcatttgaaccaaggaattcaagatcaacctagactgtctcaagactttttaattactctgtgatagctattctgcactgtgtattccccagttcagttttgcagtaaatcctttcacttacacccttttgctggttacttaaaaatgttggtgtgaaaaaaatacccatattagttcataaaatttgaagttagtatttttcttttgtttactctcatgtttggaaccgatgtttctctctgcctacagtgacttaattactaggtatacatgtgtcattcctctgctgaccagcactcacacagacttcctgttgtctgttcatctcagttgctttgggggatgactgtctctttgaggggcttacccagatcccgaagtactgtatacacctccagcacttcctctgtgcaatgaaatgaaatgaaatgaaagaaggcagaaactatactttaattttcaaaagaaggcacttctctcccctggactctcatgattgagcctcattgtttgcagttgtgacagtctataaagttgccagactagtgaactgtggcttgtaagggaaatggaggattaagttcctgcctataatcgtaacatgcttgtcagttcaccattacattagtgatttttgtgtctgttaagatagcttgtgtaaatttaattgaatacatggccaggatcagtaataatagttgaacaaatcttaaccaacatgtttttccataaggatcatcatagccttttttaaaactaaaaatggcagtactaaatggcctgtgggaagaacagttgttgacagtgtgagaggagaagcatggaagagtatcaccacctcattctgcgatagttggggctgtgacatctgttggcatgagttttccactgctctgaatgtctgtaaataggattttagacttagaaatcaatacacaaatctacagataaataaactctgaagataatgagaattgattgttacttggactctgtttttgtttaagtcagtacttaactattgtggaaagtactctatcattttggtaattacggagagactaaaacatttatgctagagttttaaaaaatggtcagccatttgtactcctttttaaaattttttttatctttatgtctataaatgttttgcgtgcatttatgaatatacactgtgtgcttgtctgatgcccatagaagtcagaagaaggtgttcagtgccctggaactggagttggaggtggttgtgagtcaccatgtgcgtgctgagaactgaacccgggtcctgcaagagcaaacagtgctcttaactcttgagccatttttctagcccctgttgtagttattttacagaaataataaagatagtgtctcaaaattaaaggactttaacaatgctggaggtctataaatcaaatcttctagccagttttataatcctcttggcaatattatcacaagtgtcaaatgtcttaattttagaatctgcatattacattcatattctacaatttcataagaatcacagaatgttgcacacatgatgtgaagtataatctcaaattgagtctgcttgctgggctcactttctagtttacaggtgcacttatacagatactttctttaaaggtggatggaaagttactgtgctggctctgtaccttatcatataagagagttttacagaagacaaaagaacagaggaagagtttggggtcttcacattccaattcttcgtcttcatctctcactgagaaagaccagcaccattcaaaacaccatcaccaccaccatcaccaccaccatcgccacagtagtggccaccacaagtaagcactttgaaatcctttgttaaaacccttcatgcattgctaatgatctttgcacagatatctacttcagtgtagtgataaagggctaggccagtttctgttgcacttggtgagctgctttagtatctggctgtactgtgaaaaatttccacacaatatatttggtgtttatgaaaataatgaagaatttatctataaaatcatgtgtgaaatcaagatatgtcagcattaattggtgtttcaattatgccagttaacaaaagcttccattttaaaaataattttagggttttatgtttataaactttgtccattttttaatcttaggggtgtgtgcataccaccacagacttagaggttagaggacagtgttgtagaatcagttctttactccaccttatggagcttcagagatgaagcttaagtggaaggcttcatggcaagcccatcccttgttacagcttagctaacttgccgtcccagtataggaagtttgtttcatttgccatgcctttatcttaataaaatcatacttaaagcatccaggcagagattagaacagattctaaaatcctttgtgacaatgatagaaacattttattttcttcctttgtagtaggaattgaacctaggtcctatgttctaagtacaggctctaccattgagctacatgcccagcccctgtagaagcattgttaaccttgaaggttccaaagcgtactatgagtactttttttattttgttggttgttggtgttttttttaaacatcggtatagttgtaatgctattcaaataaaacatcttaatttttaaagtgatttcaggtagggagaaattatggaatagtaataattgtgtgtattaagagggtctgtttaaatatagttttagttatagaaaatcaacattaaaacagatttacatgtaaatgaaaatctcaaaaaaaaaaaaaaggatacaatgaacacagtgttttttctctaaattttactatgtatctttagaatttcagatttttttggggggggggttggttttttgagacagggtttctctgtgtagctttggagcctatcctggcactccctctggagaccaggctggcctcgaactcacagagatccttctgcctctgcctcccgagtgctgggattaaaggtgtgtgccaccaacgcccggctcagatcgttatttaaaatacgattttgttgctgtttcttttttttgagacagggtttctctgtgtatccctggctatcctctcgaactcacagagatttgcctgcctctgcctctagtgctagaattaaaggcatgtgccaccaccgcctggctaaaatatgattttatatataggaaacaaatgactgccacattttgcaccacaaaagttttagcttaattgccaccaaatacctcttagattgtgaagattcattgaggctttagcatatactactaccatgttgtagtgtttcctggggtgacagcggtaaactgctatagttttaaaaacatttatggcctttatatcaaagtaacccaaggaacaaaggaacacaggccttgattctgtttcttgctttaagaagaatgacaactgtgtaccataagtcctacttctgagtctctagaatgtattcttccctggctgtctttccagggttaattttcctagcatgatgggaaagaacaagatacagaattaggtggcagtcatctaatcttaaggatgacctcctaatggaaaagggaaaaagacaatgctgactttcaatttttcactcttttgggggatagatacattaattccttgttactcacaaaagatctgttcaagttctttggaaaccaaagtccaaagtgctccagtctcttccatgatgtggtccggtgtttgcatggcctatgccttcttatgcactataaatggtctgtaaattagttaacaatacctaacatggtagatatgtccataactcattgtttctgattcatagataatgtagttgttgttgatattacgataaatggaaaggaagtcatactattataggtgaaatcatttgttttaatgaaattttctaatggattgtgacttttatatacagtactaacaaagaaaagcctatagacttcagagaggctccttagggaaactaggaaaaaaaaataaaagaaataagctatttcctggttctgcttgacacatggttcttagcagcgtgagttatgtgaaggagcttatttgcatttaggataaacagatagatgcagacttctatatggaatggccagggcagttgatgtcaacattcctagattcttacatgatcctgctgtgctcatgtactccaaacctgagtataattttaaattgagttattggaaatcctaaaaagaaattgcaatttaccattgtacattatctttaaaaacaaattgaagctggctaatgttcatttgattagagtttatcctattaaaatgtgatttgttccttatatcagatgatctggcttctgtgaagaaaagatttataacacagtttgagtctgtggggaaagaatattaaaggtagctgttatcagatgttactcgtgtgtttttcagaatcagcagtctaagtcctgagcaggagcaaggactgtggaaacagaggtaagtgtgctggtgtacagtgtgtgtgtttgaagtgtgcttgtgtaaatcagcctctctaatgtggttatttaggttgaaaaaactagtgatgttcagtggtatttgagaggaagagtagcttataacttaatgcctgttttattctaatcatttttgctaatgtttgctttcagccataaatcctctgcagcaattcagaatgaaactccaaagaaaaagcccaaattggaatctaagccatctaatggagataggtaaaaatgaatgtctttagtgctatgaaaattgaacttaattgaatagttctggctaattctgaattattactacatattttatctgagaatagaaacatgggtctcacacaccaacttctttaagtcacctgggagagtaaaatatacataatcagttaagaaaattttaattttggcaataagaaagtggcactgaactatgttgttataactggggaataaatttgggttttgaggaaagaacaaatctcaatagagaacattgtaattgttcctcaagaaaaaaaaaaaaaacaaatctgattgtagtatttttaaattgacctgcttagaaatgttttgatttaaaatatgagtgtgactttgttttagttcattagccaagtttgctgatgttactgtacaaattggctgcctattgctttacactagaagtattgaccccctaaaagctaatactgaattatatttctgcaggtgtatgtaatgtgtgccattagtaaggtaatttgccagttgcatccatttctgtcaggtacatatttttttgcattagccttaaggatgtttgtggaattgtctaatttatgcaatttgaacatctgcacattttccttctactttgtgtaactctgttttacttttttctttttagtagctctataaatcagtcagcagatagtgggggaacagacaattttgtccttataagtcaactgaaagaagaagtgatgtcacttaaacgtctcttacagcaaagagaccagaccattttagagaaagataaaaaggtgagaatatagctcagtgaagcctggtaagatttgcatcttggctttaattaacccttgcaagttttctttaaatgtttggtagtgtttgtaatgtatgactcttacaagacaaactgcagaagcccaaattgggtctgaaacatctagtgaagataggtaaaagtggtgtataacagtaacctttaaatgttagttttcagttagcatgtaaagttaaaacaggtttaacatcttaattttaaaatgggatgtaaatggaatatgtaaattattgtggtttcaaaagtaattgaaaaaagcatatatatatatatatgttggtcatgtctctgtcaatcagctggtgagagggaataatattctgatgtcctgtggcagtgattagcactaggtatctaagaacatattgtaggaacataaaatcaggtgtacttcctgactttagtatttagccacattcaggatgaagtctctattctggctgtttctgtgtggccttaagtagaacatgttcattagttgaggccttggtttctaaaattgtttttactgattcctaatagtcattagttgtttttgtttgtttggttttggtttttttgtttgtttttccagaaagggtttctctgtagctttgtagcctgtcctggtactcactctgtagaccagactgccctccagctcctgtagatccacctgcctgtgcctcccacatactgggattaaaggtgtgtgccactattgcccgatcttagttgtagttttaaaagatgaaagaaatgaacacaaagaagacctagactctaaatggtgcttgccatcagcaaaaaaggggagttcaaatgtaaacagttccagtaggatataaatagtgtttgagccctcatcccggagctccagtgtctcagttcccacattttgatggttgatgccctttattttactgctctatttacttattttttgaagagtgtgtcactgtgtgcctctggctgttctggaactcaagattcccctgcctcattgtcctaagtgctgagattaaagacatgcccaacctctttattttagtatataccacaatttgagtaaattaagtatgtaaaaattggcgttggcgtgtaaggtaaaattggatagttgtagttgtctttcttttagggttccttatgagtagctgaaactttaaattaaaatttgcttttatggaagtgtgtacattaagctttaacttactatgtaaagccaactatgtctacatttaccttgaaccaaagttaataaaatgccatgtttcctgcaaattagcaataattccaaactgggcattaacaaattgtatttcggtgtttctcgtcctccctaaaacagcagtcctgttgtggtaaccctcaaccacaaaattattttcattgctagttcatatctgtaattttgctacagatatgaattataatgtaaatgtctgctctttccagtagtcttaggtgacccttttgagagagttattcagcccaccaagtggttgcaacctacaggttgagaacctccattgtagcctctctatccctagcatcaccattgtgtttaggtagtttattggcatttcatgcgtgagtgtttcctttaaaaaccaaaaacactagcaagtttataattaaagttatagtaaggaaaataattatgtatctaaaattaactacacacttgtcgttttttctttataattctaaaaggatgaagttagtttcctgtccctgtttgagctattgagtgcttttcaaagacaggcactgtactaggtcagatgctgtctctaccttccagcagttcagtttggaagcaaatcatggttcagcgactagaatagttatcaaagttgatggtaagaattggcatttcacaacacaagcctgtttataacatacaacattgccccaaactcccaatttttctcttagcttttgcatctttttatatactaggtactttgctggagagatagctcagctgttaaattaaggctaggctcacaaccaaaaatacatactagatacttggtaattagtacaaactctgaaagcttacataatggcagaaacctgaatactgttaatagcagcgtaggttgtaatttgaagtcataaaacactacactttttgttggtgaccttatctatgaaagcattgtcttgtggtctccagttctctacaccagtgaattttcccttaattttcacttgtctaatttagttcagattttacagaagttacttatctacatgccacattgattgtatttctgtgctggtaggtaaatatagtgtaatggctttgtgtacataatgctgggtacaaatgaacaattataaacactgttgcccttggttgataactgttgtgtacatttgcacattatgaagccttttccttccatcattgaaaaatggttctacctggaaacctgtttacttaatgtgaagtgtattcagttgaaacactctccaggatgcgagccattggcttgctcattgtgaaagtgaccagttaatccaaagtcaccttctcaaagatgatccttaccattaaaaccctgacaataggaggaaaactactctgtttcacagaatatgcagcttctaccacttctcccacctgtctagcaagcgtgtgcctgttgtgaagagtacttaaatggtgtgatatctgagagtatacatgcctgtatatgaatgccttttttttttttttttcagttaactgaactgaaggcagactttcaataccaagaatcaaatttgagaactaagatgaacagtatggaaaaagctcacaaagaaactgtggaacaacttcaggtaaatggtgttatttgtgtgagctggagagttgggctggagagttaaatctgtattgtatttcttagaagagttggtattattactcctatttccagttttaattccggctttataaagttttgaaaaggtgattcacttttaatctagtgtccacttgactgttgagctaaggtcagagtgtcatttacagtgctatggtgaaaatatggtctatacttagatactcattcttcccatttcctttaggataactggaagggagtagaaaaaggaaaccagttctcaaagcctgtgaccaaagggcctttgtgctgtgtgcaagtgctgcaaattaagatggtctttaactgtgtactatctgaaagtgtattaggttcactattgtatgtaatatagatatatagtacacagtgtgttctttaatcatacagaattgaacagtgaagctgagagtcaccaccatctcaaagagggtagatattgagggtcagcatagaaaggcttattcccttaaacttgtttttatctgttttacaaattggggcatgaaactatactacattgatttcatgttgtacagtttataaattgtgatatttatagagttaatctttgagtaacaggcttatggttgttttttcgtttatttttgctattctagatcaaaccttggttttcacaagtgctctgccctaagctcagcccctaggttaaacaatcttaagcatacagatgatgtcatattcagccttcagacatgaagggagagtacagctttaaaaaggatgtgtgaatattgctttatttgtatgttttgttttctgctgaattttttttaacacccatggatattttctgttcctatcatggtttggtgtgcctcataattgagtaggatttacgtactcactggagtccagatgtatatttcccagtctttaacctgtttttactagtgacaggaaattgaaaagggtcctctgtagaaataggggtatagggaatttgttcatgggtggtgatttttggaaatggacttgcccttcctcctcagagattgcctgttgtgaattaggcctcttgtacattagttaactgtttttagccaccagccattattttgttttattcttattaagttatattgaatgtttacctgggatataatcagccttctgtaactgaagtactgcagtaaatacttctaagttatagaataaccatgataacggtaagtacttcctaggtttcatttaacctggtatgtactttccactgttccaaagaacaattccttttgttaaaggcagttgcaaaagaaccatttttactttagcctggtaggtgtctttagcatacttcctatgctaccactatggcaaacattcacacagaagggagggtatagtcagtgtgttttgtatatgctgttcgtatttgctccataacaagagctgaattatgagctattcccatcttacaggtgaaactggttatgtaattagagagatgtagatactcacattgtgtgccttagattttcctgtccattcccctatcctgcatcagctcacacctcaggttattcgattatctcaatgtcctagttatcagttgcttccctgtacactgagtttctgctagagacactcttgacagctcagcgtagtccccacctacttgctttagtagcggttactgaggtgagtatacttagttaattattttcttatctgtttcatttgttttgtttttgaggtagtgcttcactgtataggccagtttggtcttcttcggcctccaaatacttggatttttccctttacttctgcctgtttttcttaatcttttatagtatacaaaagttaatgattaacaaaatttatcttgccctaatagctctttaagtattttaaactatcaagcctaggaatacagactgaaattcatcccccacatggtataaaatcttcctaagtactaataatgtgaagtaaaaactgttctttagtaagaaaagctaaaaggggaagggaaatgaccttcgaatgctattgtgtacagccactgcattgtggctgtgtgattagctctttgagctacgtgagtctcttgtttggggtaaggtgtcctccagttaaatgtgggtaagtagataggcagagtctgtgtagttactcattgaacactcttcctttgtttaggctaacattttaaatgtttctgacttaaatattagaataatttcattggtgtctataaagtcggtattagaataaaatttcaatatgtgtacatttaaatactgtattgcaacttatattgcagctacttaaaataagactatttttcttaaagcctttgtcttaatataatttatcaacaagttactgatgtcactaggagaataaatctataaataatactgaaaattgctgcaaaagtattaaagagagagactgctttcaagaccctttttgttctaagaatgacagttcagtttcccttgatgactgaaagtggggttttaattgttgggtaagccagtgttattagtaactgcctctgctgactgggcctatgcccttcattgctcctggctctgaaattggttttttgagtttcccgttttttagccagtaggtctgttgtggttaaataataaatagctgcactgttactatttatatctggcagtgactaggatttgtcagagagtaacagtttaagctttaagagtagtggagacatcctttgtgtgtctgaggatttgctttaggattatgttgtttcttagtagtgcccaagctccataatgtttctattggctagaaacttcagaactgtcctgataatcatctgtgtacaggaggaactttcattatctaagttaccagggagtgcataaagtagcacagaccagataatgagaaaaaaaactccatgaaggtcctacctgtagattctcccgagaacaccaatgttaccaaacagcacccctgcagtgatgaccaagcattgttgtgtcaggtgacacaacagcaacaacaaatgggtttttatgaaattataccagtattgttaggaatttgcttagatgatgctaaagtcatcaaatgaaggggccattagggactgtaataaacagtaaaggatagcatcttattgccaagtcttccaactagagtttggtttccaggactcacatggtgggagcagggaatgaaccctaccacctctcctttattttcacatgcatattgtggcctcgaatacacacatatgtgcacacaagatgagtagtaattgttttttcaaaaagggcctttggcaaatgatagaatgattttcacaaatagttttatactttttctgcattaacggtaaatagcaaatggaagacttcattcagtttgctggaaaattctccagaataaacatttgatttattctttgatgctttcagttgtagaatagcatgcatgtcagtagctttcatgctttaaagaaccaaacgttttttctgatcttaaatttgaatcctctgggagagaaccgcgtgccatttcttgtataatgaactgtatttttggacaaattatgttgacatttgccaggagctctttctacctatccttaaaaagattaaatatactaactcttggatctcttagtgtttcattgataaaaaaattttatacaaatgaagaagtagtattaagtagcagttttcagcatgacttaatacttcaaatgttttaaaccttaaatttttgtctctcacaggccaaaaacagagaactactcaaacaggttgcagccttgtcaaagggtaaaaagtttgacaagagtggaagcgtgctaacgtctccttgaaaaggtctcttgtttagcatttctgcttgacagtgtgtatttgaggcgtcctgtgaagcccttaaattctgtgcagtggaaaaatatttttacatgccaagtaaattggtgtgtttcctattcacttttgtaattgacacacagcattttttaagttgtaaacatacagataaaacttcagctggtttggagtgacttcttaattctttgatacctagaactttttctagcaatagtattaaaggttgtggagtgcacgtgtgtgcactgtatacaatgcaacatgcaataatggagtggttggaagaacagcagcagggggtttgtgtcttgcttttgtttaacatgatgctgatttcaaataaatagttttcaatttagaaatgcaaaacttttaaacaaggaaaatggtgaacactgatttttttggggaattgtatttttacttcgcatcaacatgaatttagagaatcatggtgcttttattaaaagagcttcagagtatatgtgaatatgtttttaaaagttacatcactaacattagtttagtaatctaacatttcattgctgttataggattgatgtttactgtacagcatccaaggtaaaatgtgtttttgttttgtaaaaactgtagatttttacttacaagtgccttttgccacctaatgtttttatttataggaatgctgattttttgtacatatggtttgtttaaaaatcatgttaataagtgtttgtatataagtgcatatgtacagaacccaatttcaaaaagaaatcaattagtaacatgcaagattgcatattaagaattaactgataatgcatatagacttaagtgattttgtgatttgattctgtatcataagggaagctgttggtcattgagttcatttaattatgttgaaatactttcctaaagatttaattttaactccattttgatagagtgattttatttttatgttgtgtgacttcatgtttatattttgtgagttacatgttttgctttatttttatataaaatttctttaaaatttataatgtttctataacggtccatatatctgctttttttataatgtgttgctaagttaatatttatgtacaccatacttactttgtaaacttattacaaatctggaaaattaaataactttataatcaaatccatgcttgtgtctgaataattgaaatctgtaagattcagacactacttataagtaatttgtttcaaagtataaaattgtctataaagatttcagtagtatggaatagagtctgtgaaattacaaattagtttctgaaccctagtggttttcagccagtaactgaaattggtctgcttaatgttagttctggtttcaaggtgaattttaaaactaaaggcattgctagaaacaacatgtggcttcttttagaaatacacatttaaacttgtttgaatcagtctgaagggtttgtttttagataagtgtttatatggtcttcatatcaaagattagtgtttttaagcgtacataattgtaacaattatttttttcagttattcaagttttagtaaacttcccatagttgtttactccaagtaaaagcaaatctagcaatttgcaaacacataattttcaagtaacagtaagattgagttagatttggaaaaagtttgacaagtctgttgttatgacaccctcacaaataatgttaatttattgttctcaatcacagtagataatgccttaatgtggatactaatatttggaggatttgtgcattcataaagttgtcgttactttgctttaagttttgtaacgattcatattacagtttcctggccatttttcaaaccacagtagtcaaaattctaagtgaactacaatagttcttacaccttgttggagatgatagaaatgaaatccccttttcccctttaactaacatggaaattgagaatcagtataaaatagtgaagctttgtaaagtgaaaggctaaaacctaaatttaggggcctcacagtattcagtcctaataagacaaactctttattctgtgaccttattttataacttaattgttttgcaattgtataaattagtaattgagtcccagtcccagatatgtagtgtattggcctaatgagttgataccatttaaatgtggacctgtccagaaatactatggtgtgctgtattgtacttttagcctgtttgctgcagttagcatatcccagtgagggtcatttggactccagtttatcatgtattaatagcctgtgaatattatggtcatctttaagagtgtattggtctaaatattcattttacaatgaacctgttaatgctggtcacatgtataaattaacaaaatattgtacctgtacacatctgactgttgacattttgtacttttttctaaacccaatatttcacaataaaaatatgtcaaaagctttgtgttaattctactatagtgatttactctaatttggtgtttaacaaatgcatctacaaagtcccagttgtccagaagggtgccatatttccaggtgtaggaatctcattgtgtacattttggggcgaggcattattacacattccctaaggttcatggttttccaaggaagtcctaacacaatagatatgggggaaatgactgggactgggcattagaagaatatcctatctggttcattcttccttagtgagatgggcaagccaatctgaatatagcagtttaacactacatagaaaataaaagcaatgtattgtattgtgtttatgtacgtaattaaacgacagagaagcacaaaaccagagcagtaattggtcaccattgacaaatggttagggactaattcattattttgaacactggtattattttcaaccgctagacagatagactaaaggcagtttttcttgggaggaaaatccacttaataataaataataatccatttatgccaaaacttaagatggaataatgatctcttgtttttgcaacttgcagtagagagagcacattgttacagttgagtgttctgatggagaaacactccctataaagagttgcccagttagtagatttagtttctttcaaattagaaggaaatagaaccaaggtcagattgaaaggcacaccaaaaggatgtgattggcactgttatttcttcataaattgcaaggggatgaaagcaatagaaatggaacctgaggcactcaaataaccaatcatatttggtggccctcatttttaatgtgaatcaaatttttaattttttgaagaaatttatacaatagaggaattttcacactggttattttgtaatgtgattgaagaatcattttctggtgtgataatggttataattactctttacaagtctttgtggcaccttctaagttaaatgcttggtttttgattcatctcatggagagaaatggattggaatataaagaaagcagaattggttgagctgttgcttttaggtgagtgatgtgtaaattactgtcccaattttgtgatccagctttttgtaaaaacaaaacaagcaagcaaaaacagaaagaaaaaaagaaaagggcaatgcaaacaggacattgtgtggcctgtaatcctattacttgagagactgaggcaggagagtcacaagattgaggtcagcctggccagtgtgatgagacatctcgaaatacaaaacaccgtgtcagcgatccctaccaaattatgctctgttcactgagaaggaaaacatgtgagcagcattaagttcaaggaagaaaggaaaaataatgtcgccaccactccaggttgtccctggagatatccatggtttgcttctgctcattttcttccagcaatgtctgagtaatggcagttgcgatgctgctgtgtaggtttggctcctgtttctacctcctaacaaacggagtcagtgctacaaaacaacatagggctggaactggagctcattgatggagcacatctaatcattttcatgagccatttgccagtcattgcttttggcgatctgcaagcaccagattttttaagggagcaaaggatcgagttgctgagggaagaacaaaaatgttctgtgactgccaagttcagggtcccaacttgccacaacttcctgtgtctccttccttgttcctgttcttagtctgtctctcccccccccccccccttaaaattttaaaacaatactcatttcctagtttgttaaatgttacaatgttacctgtaagtctagtgttgcataaatatataatagcagaccagatccaccttcatttccacactgtatttcagtacaacttggcaactccattgagatgtctaaccctctttaacatatcttactaatttacctttttttatttactgtgtgtgtatgtgttctcacgcacacatggacacctatgccacagtgtacttgtggaggtgagagtactacttgcaggagtcagttctctcctactgtgtgagtcttgagattcgaactcggacccatcaagcttagtgacaagcacctttacctgctgatccatcttacccatccaagcctcttatatttttgatgattagggcaggtgagattggagaggggctgctcctgggatcaagtgaataaaggtttgtctaccttctacagtgcacaagcctacacaaccaagagctgttagtaaaggtttctgcaagcctgcacaaccaagagctgttagtaaaggtggctgcaagctcaggttgagctcacctgacctagtgcaccttatattggtggattattaacactgattctcacagtttcccagacaaagtccaagatgaaggcactggctggtttcacacttgtggagaggacttactcttagatgttagcttctcatcacatcctcagtggaaagtcaaggcagctggcttctcgtgtctaaggcattatattccctcgctttctactgtcaacagttggtgatccagcagaggaattttagagagaatgaatacaaactcctctgagcccgaaaatggatttacatgttggctctccaatagcctaaagaccttgactttaaaacaacctatacaaagctagaaatcattgactcataaataactatccctctgtcttaaaattctgtgcatactaagaggaaatgaatcttggtaagattttaacctttttgttaaaattcctaccaatgtccacaagagggagggctctgctacgaaacagtactgcagcaggtacctagccagcccagccctagaaccctcagaggctagagccagcctcttagctgtgagcctagcctttaggctgagccatcaacagcactctagttacttatagttgaatgttttgttatatgtgaatacatttcacaagcaatcagtccatcatacctgttcttattgcacttgagggcaacacagtagattaggagatagtagtactgaattagaagctgtttacctccaacaaagacagtgggcatctaggtagtggtggcacagatagtgagagcatcactgcttttctgtggatgcagcacggtgctatatgacacactatacaacttgtgcagccatgaaagctcccctatgccttcagttctcaccaagtcagaagtggcatgctttgagttaagctctcacatgcttaagatcagcagtttctcaacctatggggctcagctggcaggggtcgaatatcagatacttaaattatcattcataacagtagcaaaattacaattaggaagtagcaatgagataattttatggttggagtcaccacaacatgaggaactgtattaaagggccacagcattaggaaggttgagaaccactgctttagatggtccttaagggtagttaacatgatctgtgtatttcaggtgacagactttttccatatctgatgaatgaagctatacattgctaataggacaatctgggaaaccaggctggctattttagcttctgtcaaattattcttgtattgataattttcagtgcagctcaaaaaaattgtatttcctttgccgtgtgaaaacctgacaaattttggtgtaggcagacttttcttcccaccaaccggttcccacataacaacacagaaacttcttagtaatcgtaaatgcccagctagctcagttggtagaacatgagacccctaatctcagggttgtgggtttgagcccacattgggcttcatttgtaggtgaagggtttttctggtcaggactgatggatccccattaaatgcacaaagacttaattataaatgctctaccaatagttctggcttgttactgaagggaccagctccccatatcagcagccataacagccaaacacgtgcttgtctgaccttgtcttagtcactaaggtcagatgcttgccccttttggcagccatagcaaccgcacatgtgcttgtctgaccttgtcttagtcactaagaggtcagacacctgcctcatggcaaggaaccaatcagaagttagctggtggtgctatgctttatggctctgggtgtgctttacggacaagcacacatcaatgacacacagagcatagcaaccaccctgggagggcctatgggccataacaaccagttgaccaatcaacacagggcaagccctccaagcctggagccacaccaatcctgagcctgtgtgtacccctagacagtccccttacgctgccctacaagaactctatgtagacacttccctagctgtctttcctagccatccgccatggtggatggatggaaggcccgagctaacatggggttagctcattaaacaactataataaagcctcatgctgtttgcatcaagctttcgactctgcatggtgattggggtggcagcggtcctgggctgagatcctggaggcctgagctttccagagatcttacagttactagttaactcttatattttaaattaacacatatttcctatctatcctctgccacatggcggtaccttctttcaaagtagcatgttcatcttgcttccctctttgtctcttgagactcccaagactacacccttgttcccagcctcctctcttatgtcttgctgtccccccatacatcctgcttagctataggccagtcacctctttttattaaaccaatcagagggtgccttgacaaagacacagcatacaaaaagattattccataacattttgggcaggataaagtgtgtcagttttctttgtcaaatgaaatttgacaaatttcaatttttgagtgaatatccaatgttatggaagtactggaccaaatgttttactgtattagtaccctgaataataagttgcaaattctaaaaaataatgagtgaaacccaaaataagggggtggaacagatctgaaaatggagctatggtactttgctatctagtttctaatgtaccttgtgcctcagtcatgactttctgccttatgttgttatatgtatgtacatattgaattcatattcctaattccagtgttagtttatctcttcaaacgcttccagaggtttcttagcccagcacctagcatcctattaggtgggtggctgcctacagccatttgttgttgtagaggccatggtccttttcttctccagctaccatctgcctgctcttttcagtttacnnnnnnnnnnnnnnnnnnnnnnnnnnnnnnnnnnnnnntctttctagctcagcttgtcacaaagcagggagacaagcagtcgagttttactttaagacagttcaggttgttggccttgaactcaatatgtaggggcaaaagtgacattaaactccaaatcgcccatctccaccccctgagcaccagttacaggcatcgaccaccatgcttggcttcacctgaaagctttactctctggacttagcagatgtctagagctgacttcctgaaatgagacacgaggctctgtcaaagctggggcttttccacattctctggaatcccctctaaagtcactgggaactttatacctcatggtctgtgatctgagcatgccacactcccatggcccttcttctggcctgggagctcagcttggtttttgagtcctgaatgaagacttttgctggattctcttgcagcttacttcacacccatccacccagagcagtcttgagcaaaaaataggacatcttcaagccagctgggcctcatttccaccactaaaaacccgcctcacatcttagctttgtgttctttcagtcagttctatgaagaagaaatcgaaaattccagtattagctgagagaattcaactgactgacctggcctaagtatcagttgcagatccattcagttgtggctcgggcacagactccctgcagtctgagtgtggccaccagatctctacacaatgggaaaggcagtacacatgagcagtcacggacagtgctggcatggccactgtgggtaccacaagtgatgcatcaacttctaatactttaacttgttttgagcaaatgttagaataattttttttcttcacgaacttccaaagtacactataggatatatttatactataaagacaaaatgtgttatattagtttatcactctacttcacgggtgcatgtaccctctcatgaagtcatattagcaatctgtagatgctgttgtgcaccagtttcctccagactgtaagattccatcctgagggaagctccttaggcaagaaagtaaatagctccaggaagtccctgaaactgactagattcactgggtccctcccttccctccctcccttcctcccttcccttcctccctccctcccctcccttcctcccttcccttcctccttccctcctttcctcccaccctcccttccctccctctctccttccctccaaaaagatagtgactctcaacctatgggtcgaaaccctttaggggttgagtctcctgagaccattggggaccctagatatttacattaaaattaacactagcaaaactacagtcatgaaaataatcttatggttggggtcacgacaccacgaggaactgtattaaagctttgcagcattaagaatgttgagagccactgctctaagtctaagacccagatgagctagctacctgaaagaagcagaaaccagctgagctccctggaagaagtttagaccagagtcacttggaagagacactctccaacctgttgagccacctgcaggctgtgcagtgtgctccatgtcccagctttgtgagctgtcacccatgctggggtaggctttggggacatggctgtcttagagtcatttctgctcttgtaagtaacccttcacccacattcctgtaagtagatcctccccccccccagagtcattgtttaccaagtttgactttgatggtatccatcctttggtctgtcatgggccccctatctggggtgagtagatgcgcatctctgcaggaaatgttttgccatccaatgccatgttctgttaaatgttagtcaacatcctggtgtgtcttctactgagcaggtggcattttgagggagtaataggcaatttagcaaataaagcagtggaaacatgatgtaatctgacggaccagtagatctgacatttgtcaatctgtggctgtctgactttcagtagcagagcaggcacagtttgaaagtgtggttttagtttatcaatgttgtgaactcacaatgcagataatgtaacaaaggaaagtgcactttaaagtttgaaatctacatacaaaacaacattaagaaatttaaaaaacagtgctggagagatggctcaatagctcagtgtccttgcaggtcctagggaggacaagagttcagctccaagcacacactctgggcaggtcactcacctgtcactactgctgcaggagatctgatacccttttctcacctcctctggcatctgcatggaggtacacatgtatacattcagacagacacacagacaaaataaaaaataaataaacccttttttaaaattaaaattagcaacctcgccataccaaagtgatttcaaatttctgtacttaggatgtacttccctggatggacatcctgtccagctttgccatccacagttccttcagagctgaacttcagttgtgacaggcaatagaaagtcactgcaatgacaaaatgggccagtacctaataaggcatgcagattttttttttggtacttaataagtagcagtagaactgaggataggatagtgtttatgttgagcattcctgtctcagccttccagggacatgcccatccactcacccactatccactggttgctggaatgtggaaactaactaatgacttttgagtgttgatattaatcttctttgtatgtgtttctactcccatttttattttacagcatggatcagaagtcaaccccttttctctacaatgcctgggattgaacccaggactttatacatactagtccaacattctaccaggaagttgcagaccaggcatgaaaaagtagtctttctgaatttgcaaaagacattactggctctctcacatatccgaatgccctgtgttcgtactggttaagaaaatgtcagcacactgcaaacccaatgctcaccagtggtggggtgtgaaatatgtcagatatcattagcagattcaaagagttttacaagtgggaagcagcatgagttcaccaccacagaagccttgcaagactcagcacccagcattaggaatgaggaccggcccgatcttctgcaacagaagatagctctaaagctacagcaaacaaaacaaagtcagtcgacatcataaaacctcgtgtatggctcaaatgagaggagagcagggagcagaggcatcgtgaaagtcacacacagaacaaagacaggccctctggccaccttcccagatatcatggcagatatgagattctagcaaatattttagaagagagaaaatggatgggtttttgctcagacttagtagagttagaagagctggaacataatgcctgcagaaggcaaagcttcggtgcagcagctgttgcactccacaggaccaaggaaagatgggattgaagcaagagagagagggtgaactgaatgaaagacttaaactttgtgaaactttctgcccatccctatcaaggtaggcatctggaggcttgctaacagaaaaattaagacactctgtaattagtgatgacagacaaggccaaaggtcgagtgagtcagcagactagaaatgggtatggcattacattttacatagagatggtgagatctctaagctcacttatttatctgaactctcagctaaattcagacactcagtgtgttgcattgagtcataggtttgggggaatttaattaggcaaggcaagggctacggtggttataatgcattaccaaattgcaacaaatacaacagcacaaaacaccattttcttgtgctgatggtttcttaggcccatcttcaggccacacacacaaaaactatgtggggacagcttttatctgcttcacaacacctagaggctcaatgggacatcaagagaaaccccaatgatgaaggacagaatcctctagaaacatctttaagcacaggcatagtggctaatgaggtgatgtaaggactgggttcttctgggactgccaattagagttcctgtgtgagttctcttcgtgtaatttgagtttcatgtgatgattgacttgtccagcaaaaagggtagctgcttcatggccacctatgtgtgccatactctgtcacttttgctgttttgtgttggcccaacccttgcaggcacaacagtggcataaacacattatccacggtagatttatagctactggaaatcataagagatgagatcaactatcaggaaggccttctggaaattaaggcagaaagtaaagaaatgcaaatccaggtccactagagttaaagggttactgagaggaaagaaaatattcatgtgaacctgtgctggtccctggggtttctgctataggccctggctacatatgggggcttcatgggggatgcctggggccctaattataggaatggctgagatcaagtgaactttcggagtcctagcaggaaaagctcagtagcccttatttggactctgtcttaagaaaacaacttagttccaggacagctagggctgttacacagagaaaccctgtctggaaaaactaaaagaaggaggaggaggaggaggaggaagaagaagaggaggaggaggaagaggaggaagaagaacaagaacaagaacaagaagaacaagaagaagaaaagaggaagaagagaagaagaagaagaagaagaagaagaagaagaagaagaagaagaagaagaagaagaagaagaaaaagaagaagaagaagaagagaaagaggaaagaaagagaaaaaagaaaaagaaagaaaaagaaagagaaaaagaaagaaaagaaaacaaccagggccagaaacacatatctttaatcccaccctgtgggaggcagaggcagttggatttctgtgagttcaaggcctgactagcctccagccagggctatacagtgagaccctttatggtgatacattatgatttattaaagcttgcccaaggattcagaaagcaaagtcagcctcaggctctagagatcagacagtggtgatgcacacccttaatctcagcagccagaagctaggaggtggtggtagtacacatctttaatcctaggactcaggattaagaggtagacggatctctgtgagtccaaggccactcagatctacacaagactgaatcagtcctaaagagaaacagctcacacaaagatgatctcagcacctgggatcacatgcctttaatgccagcactagagaggtataaaagacaggagcagggtctcagtagtcagtatcaggcattcattctccagccacattgaggataggaagacattgaagtctcaggattctccagccatgctgaggagaggcagcagtttgaggtttagtggagccaggatcacatttcattctgaggtagagtgagagctagtgcccagctgctttgcttttctgatctttagcttgaagtttgaaccccagtatctgtctctgggtcatttgtttattgagtaacaaacaaccctgtcttaaaaaaataaaataatcaaggaagtttaaacactggtggaacagcattggctgtaatagttgaaggacaacaatggtatttttatgtttaaagaatagtttcactttttacaatgagttcttgtgctaggtagggattaactcagttgataaaatgcttgtccagtgtacctgaatccctgtgtgtggtccctccctagtactccatataccaggcctgtgttgcacaccagtaatctcagcactgagatagtagaggcagaagaaccagaagttcaagatcatccacacctacgtagtgagtttgaggccagccttggctacataaggaaaggaaaaagggagttcttttgaagaaacatactaaaatgtctacaaagaaacagagtatttcttggagaagaggaacaaggcatagatgggctagatgttggtaattatggaaaccagtgacagccatatggtgttccttaattattttctctccttctgtgtatgtttgtaactttcacacacacacacacacacaaaaaaaaaaaaaaatttaaggcttgcacacaaacccatacatgcacgtatgtgcatgcagacaggagctaacctccaggcaggattagctgtacttcagagaagtgaaaaatttagaataaatcttcaaatatttgcacttgtccaagtcttttttttttttttttttttttttttttttttttttttttttgtagagaaatgcaaggcctcactgctccacaaggaagaagtgagcctcatatcagtgcctcctggtagtcagcacagcagtggtcttcacactctgatgctctgtttgaagctacataaactccaaatgcacatgtgaacacaagaaaaggcaaatttgggttaagtggtgagtggacttgttttcatctaaagtccccaggtctggagagaggctttgctgtactcacatcagttacatttctccattcttcactgttattcaccctcccaagagctcaggctgactttacctgcagttatctgtcagacctgcttcctggctttggccccacttcttggcaatgacctgagcacagcaaagggactggtgacctagctttacactggcatcctcacaacccacagaacagtgtttaagttagtgcgcattccccatgcctcttctgttatctccagttcacagctggctcaggttatgttgtccatcatcctctagtggaatggttactgcctccaggaaactttcctatgacaggaagaattcatcttcaggcctctgtgttccagtagctaagtctgtctcttttagatgaaagcgtgactactatattttctatcacacatattgtgatgatcacatactgtgatctagttacagatcttgttccttccagggactgtatgctcctgggccactggaccacactcagttcatcaccagggaatatctagcattggtcatgacacaacacaagagtaaagtaaacacttcttgagttaatgaaccaaagcttccacacatatcccttggtgaattacttaaaagagtaaaaacaaacccaaattaaaaacctatacatgcttgctaggtgtaatttatcattctccagaggtcaattagatagacaatatttttaatggtcccttccattgctcttctgctgactggaaggaaagaggagtgttttggttgttattaaaaattcttcaatattattaactacctttctgaagatgaacttgagtccagacctaattaaagtgttccctttaaatgatgggtaaaggggcctccattcctccctgggctggttaggcaatatcttcttctatattaaacaataaaggcagatctgtggtctccagcaagtattttcctaaaagaacaggtgttctcaccttggttaaaaaaaaaaaaaagcaataaaacccgagctagcctccccaccacccctggaatgcagccatccatacactgtgcagtcccgaagggtccttgcactctgaacagatggataattaggcagaatattctactgagagacttttgagaagaaagtgagggattcagaactaggaaacaagaaaggatgatgtggcagcagtggttgctctgtagagttcagaagctcattccttttgaatagaacctcatcaccttagggcttctgctgagggattaaaagggactactctggtctttgaagaggaaggctaagtctttgtggattcatgtgattcttgttttaattggaaagccttttttgcctaaagaataatagtgattaaaacagttctggcattacatttccagatgtaactcagtcactgaggctggacttgctcttcacccagggcactggaaattggacaaatgtgtatgtaatagctttgttcagattttgcacagcagtccaggactaatccccgggaggaaggaaattagcagtatggtggttccagcacctcagctttctgtacttcatgaatggcagtacatcgaggagactttgtcttctctggagaacacagaaggcagaggattgcctcaattggtatgtcagactttgttgactccccaaggaaggacttatccctctaaggagtaaatgggggatgggaaggatgggaggatggggagtgggagaaggggagggagggggaactggggctggtatgttaaatgcaaaataaattttaaaataaaataaaacctgctacacaccccctcatctctgtcattaaacaagagggagccttaaaataattagggttggcatgattttagaggattaatgttgtaacaaattagatgattttttttttctttttttctgttttgatgttgacaacacattgcaaattcttgctgctcatcagtgaccagattcctctactgggtaattgaaagttaataggaatgtctacttgtgtattcatagacattagacattgctttcatctctgtttctctagatgggggattaaatacacactgacattgttgcctatgggtgcctctttgcatcttcagttagccaaggccagtttctgtactagccatgtaaaggtagatggtgaagggaagttatatgtttagattcagaagtggcctgccagccaaatgagggagaattctgaattgtgccttcttgattcaaagtctggtggtcactaggagtgtgtggcacccagcacacactcccacagcaagtatccaaaatttttgtgtgtcttaagaataatttctaaaactacaaaaacattcttaggaggctagggagatggctcagtgggattatagtggaataatcttttttgtacactgtaaagatgtgtctttgccaatgcaccttctgattggtttaataaagagctgaatggccaatagcacaaagagattaggtgggacttctgggcacagagagaaaagaagagatgaatctaggcataagagatacgtcagaggacagggagaggaaagaggaggtgcaatacggaagagaggttaacaagccatgaggcaaaacgtagattaatataaatgggttaatttaagttctaagagctagtgggacaagccaaagctataggctgagctttcataatcaagtctccatgtcattatttggggctgtcagagtaaaagaaagtccaactactggtaataagcctgctctggatgcaggtggactgcattgggtccccagcacccataggaaaagctgggcctgccatctcatgcctctaatcccattgcagggaagagacaggtgatcccaggaactccctggctagcaagcaaagttccagattcagtgagatagcatgcctcagaaaatatagttgagaatgaccgaagcaccaaattttggcctctgttctccacagaagcatgccttgatatgtacacacctgtgcacatacttgcacatacatgcacatgtacgcacatacacatgaattatgtcttggtgaatacacttagaaagtgttgcttattaaagctaaatgttgaggacaagttttattagagtattgtgaatttctatatagagagacaatgcaattcccaaacttgtaaacttaaattatttaattaggcgcaatgtcccccaggctagtgtacttggcgagataaccagggtcatactgagcaagcagctttgctagaatttgaacacaggctgtttggttggagaacacatttgtgaccacagtactctctcttccattttatttttttcctaagggatcttgcttacacaaagacccacagatcacactaggaagggaactcttgagataaagagagcatattttgctgggataggacctaataggtcctaactctgggccaagtcattaaacacagagagtggaatgttggctataaagggtaaccaacacaactggagactcagtgcttatgttggggtttttaaaagctcacttcgcaatgacaatgattggaactttctacccctctcctcaaccccaccccaggattcctggtcctgctctgtaaatgttttaatctagataccatgtgcttctggttttgctttgtttgtttgtttttgacagtctcatgcatctgaggttggcctcaaactttgtacttagctgaggaggccttgaacttgtgaaaggttctcttgtttctacctcccaaatgataggattatagatatgcacttccatgtccaccttatatgatgctggatattgaacacagggccttgtgcctgctagtcaagatctcttccaacttatttccaccctcagttccactatgatatgagaaatttctttgttcatcatagtgtcctgaccatgtcattccatgctacagatttagaatttctcccccactcccaaccaccctccctacctccctccctctcctctgggtagtgctccatgtgtgtgcaggtacctgtagaggccagaagaggacatcagatcctggagctggagttagggttggtgatgagccactcgacctgggtgctgggaactgaatttggatcctctgcaaatctcttaatcgctgagctgtctctttggccctattctataggatttaaatgaatattcattgtgtgatgaattatctacctttaaggagatagcatggaaagtctcatgggagaaagaaagggttagggctaaatatatgactcagcagttaagatcgaatagtgctccctcagaggactggagcccaggtcccggtccccatgctgggtggccatccagatccaggtacatcctggctcttgatcacaacatgctaactgccaacaaggatgctgacttacgctggccccagggagagagacatatgggggcagatgattcttttatcctcttttgttttctgaataatacacctgtaatgcagtgtaaatagactggagtttggattactctttcatgataacatggcaacaacagattcacactgaacatagacctgggcatcacctaggccattaaagggaccacagacttgaggaaaataaacagcttgcaggaatttctagaaaggctgacacagaaaaagccaggtgaggaccaccaaaatgaacacttccctttcaattccagatcctgctcatgcagcagcaaagtgtcctcaagagctatagagtatcttacttaggacattgccatccaatgaccaaatactaatcaatcggggagaactttaaatgattgttatgaagttaacaataagtttgaaggaagcagaaaaagctttcaatattataacagagagacttagcaaatagatggaagcgactaaagtaaacaaatacatatgtaaaacaaacggcagaaggtgtgaggtatgtggtatgtgagacagaagaaagagtccccaggctcagaactcaggtggagaggaacagagaggaaagaatgaaggtaatgaatgaaaaagggacaggtagtataaaagggacagatagtataaaagggacaagtagtataaaaggagcaaacactgccgtattggggttggaaaggctcaagaatgccacagtggcaaaagcttattcagagaaataacacagaaaacatctccaagtctgtctgagtcatttttaaaaagaattttgaaaaaaaattatgcttatgagtgctttgtttacatgtgtgtctgtgcaccacttgctggagactgagcccaggtcctctggatgaacagtaagcactcttaaccactgacccatctctccagtccctgcctgagactgtttagaaccaagttcccaaaggcaaaggatgaagttcaagagaaaagaggcagcagcgcagagcttctcagcagatgcttacacaccaggacccataccaggaaactgcaacaggaggagaaacagagcaatacaggtgtgataaagacactcctagaacaacaaatgcggagataacatgtttctaccaggcctgttctgcaggaaacagtagaggaagatcttcaaactggaggagaaatctgtgaggaaaaagagcttgaaaggtcctagcatgcagcagaagagaagacatacacagagtcctccagctttaaggtgtggtatgaaagtaacaccttcaatatgaaaattaaaaatcactaaaatagtataacaacaacaaacaaatatgtaaaatgggatatcacacattcaatatggtttaaatggaataactatggacatgtcttaatagtgcatcttctctgtatttattggattttgcttatatccttatgttcttgtgaagttgctctcattttgaaatatttagtatgttcaaagatgttttaaagcctcatagtaattactaggtctattagttacttttctgttgctgtgataaaacatagtgaccaagacaacttacaggagcaagattcattttggcttagatccagagggatagaagtccatcaagtcggggaggcatgagagtaaagtggcaggcatggtggcagatggaagatgaaaagctcacatcttcagctgtaaacacaaagcagagacagagttcaaagtgatggggttttactcttgaagtccactccccagtgatggatgtgcttcttccagcaagggtgtgtcccctaaatgtcctcaagcatcatcatcagttggggaccaagtgttcaaatgtccaagactgtgggggacatttctcatcaaaccaccacacaaataaaagaaaatccattggtaaacaagccaaaacatagtaagtaaggaatcaaaacatactaatataataatagttcatttaaccacatgggaagaccaagagggacaaagggccactgcaataaaactagaagacatgctggtgccaacttacctctcagtagttactgtgaatattgatggattggtttacctaattggattaacacagagcaactctaggaagtaagaaaaattaccagacctgagtatatgttgtttacaagaaactcacttcacctggcagaacacacatgatctgaaagtgaagggatgaaccataaaggaaaacaaggataactatacttaatttggataagatgtattgtcttatccaagagtttggggttgggggatggctcagtaggtaaagtgcttgctgcacaagcatgaggacctgagttcagatgccctgtgcctacattaaaggctaggggcagcaggtcacatatataatcccagtattgggggcaagaacaattcaaatcctgaataggttgaaggcaaggtatgataaaggctagagcagaaattcaaaaagcaaacaacaaaaatgcaaatggttgatggcaaaaagatattctttggaaaactaacataataaaccctttgctagaaaatgagaggggagatgtattacaattgagatcatataagtacagtggtcattggggattattatggatgatctccaaaatctagtaacataaaggatggatgggttcttaaacaccaactctaagaacactggttggtgaagatgcagacaacctggatggagtagcagcaagtcatgatttttgagtcttgtttaaatgcagcccattggagaagaacctgcactagctgagtcactgctgggtttgaccaaacatttccagatgaaccagcatcagttcttctcaagtcatttccataaaatagaacaggaaggaatatggccattattatcttgctagcaaagcaggtggcaatacaataaaagaacaatagaccagcatcctcaatgaacacagacacaaaaaaatcctcctcagagcaccatggcacaggagaacatattggctagtgtgcatctgacaagggttatgttgtgttggctagtgttaattgtcaacatcacagaatctagaagcatccagtagatgggcttctgggtatgcccatggcacattatcttgatttgagggaagacctgcccactgtaggtggtaccattccctggatgggattctgggctgtacaagtggagaaaaggagacgcacagcagcaactacccattgttttctcttctgatgtgatgtgaccagctgctccttgcatttatctcacttccccacatgatggactgtaccttgaactctgagctaaaacaagtcttttcttctttaagttggctaacatgattttatattttatatatcaatcacaatacatttagaaaagacagccattgcaagaaaattggacttaaaaattaatctttcccacctgtcaggacaaaaatgtgactttcatatctccctctgattatgcagctcactgttccatggggaacagtaagattgttgagcagcctacagcctaggtgacccccttgggcatcttgaatcagtgaggttgtaaaaaattcagcagtgcagctggacaccctaaagagaccagaggagcctcattcagctgccctagttgaggtgacattgaaaatcgttcttttcccttctgtcatcatgaaactgttttcatttctgaggactcggttaattatagagtggctattttaaggttgtttctgcctacatgatgtttgtgttttgtgtattttccttggatgaaagtcaagcttctccttgggtacttgaaatcagaaggacaaacaggagccaacatttgttcagtgatagctacagacattgatttcattaaactatggctgtgacccttggagtggtacaattactttcatttattttacatgacccaaggcttcaagtcatcagtttgtgtgtacaaagatacacagaagggtgttgttcagggtgatattcagaactatgtactaaaacccaaatccagaatgttctacataagctattataaccctatgttagtctattttccaaaacaccagagaaaaacgtcttaaaagggtactgaccccaagtcttctctgcattaagacaaatgctcttaatcctaagccatctctacagctcctttgtttagatttttgagacaggattttgtgtagcacaggttggccccaaactcattataaagctaaggagggccttgaacttctggttctcctatctccaccttctaagtgctgggattacatgcttgatccacttcagccagccagcacccagctataacaacccaggatgtgaaaacaaccacaagttatgatagcagaataatgcaatgagagagcctgctccccagcctggagtacagtccacgacagaaaaacaacacgaggggtattaaacagagtccaggtggtgtcaaccgccgggaaccctaagactttaactgaccacagccatagagcgagtcctgacaaagctgggtgtgttgtttctgaagcattgctttccgtagaagaggcagctctgggctttaattttttgtcttaaagtaagtaggttggtggcccagtaatccacaaggtcattcccagttctcaaactcagtcttctgatttgaaggaccatggggtgggtggcagcacacacctcagctggaggtaagccaagatgtccctagagagatggtttccacctttggaggaacaggatttgagcatgggagctgcactgagatcaaagcttgttattaacacactgctttaaagatgaaccttctggaaggagcaaagcagttctgtctatagtggagtgttcatatcaatgcaatcttagcatacaacgacacctgctgtatgagatttaatgaaaatctaaaaataaggtctactgtcctgtgcggagaaaatcactctgacagaatttgatgaagagatctcagcatttggaatcgcatgtgtctagctcctgttctagctccgtttgggctggtgagcagctgtctgttaggaaacttaatgatggacatgttccagaaacagtttcctataattcttccacattagtgtagaaatcagccaaggctgagaatacaaatcagtgatttttatcatgcaaaaattattccagttttcctcttgggataaaccttgcaactgaaacacgttggttttgagtagatcccagacctattttgcatctgcaaaaacacaaatatttaaccttaaacagggactaatggtcacagcatctgtgcaactcagtgttgtgaaaaagtaaagctatctgaaatccacctggcaactcattgcctttgtaggtttcctttttatttatttaaagagttaataacattattaaaaatgtgacttttgccaggtggtggtggtacatgcctttaatcccaacactcaggaggcagaggcaggaggatctctgtgaattctaggccaacctggtctacaaagtgagtttcaggacagctaaggctactaagaaaaatcctatcttgaaaaacaaaacacaaacaaaaaagtatgattttggggagagggagaacagtgtattattataatgaagacaaaaaatatcccaaccagctatggtttctttcttggtaatatttttatgtttgttatgtgtatggatgtgtgtaggtcatgtgtatatagaggccaggcactataagccatctgccagaggtgttgggaaccaaatttatcctctgaaagagcagcaagggtttttaagcactgagccctctctccaggccctggtgaagttttcatttggaactggggaggactttggactttcagacagtgttgagactgtgattgactatggggccctttgatattggactgagtgcattttgcaacatgataaggctaccagtctatgggcatcagggagtggaatgtgaatggcccccatagtctcatatattgaattttagtcatcagggagtggcaatatttgagaagattaggaggtgtggctttgttgtaggaaatgtgtccctgggggtgagctttgagatttcaaaagtctgtaccaggcccagtcctctgcctctcgcttggcctatggatcaggatgtagttctcaactactgtttcagcatcatgcctgcttccatgctccttgccatggtgacaatggactaagcctctgaaactgtaagcaggaaacccttctgaaagaaagcatggtgtctcttcacagcaatagaacactaagcaagacaccccctttaccatggacctttaagtctttatggactacttcatgttgaccttcaaaatctttcactgaaatatacacataaagacagcacacatagacatatacagagatagatacacttaacacatgcacacagacaggcacacatacatacatacatacatacatacatacatacatacatattaaggttgtttctgacaccacacacacacacacacacacacacacacacacacacacacacacacacacgaatgccccacacaagaaaaaagtctgttacccctgtttcagattgctgcctagggaaaggactgctccaaatgttcttccctcaacccctctttctcctccccaatgctgaagctccatttcagtgtagcaggggctctggctggaagcttcctgtattctccatggtgaatgacaattcctctcttttctacaagtttagtaaaacaatttctaggtacattatgggtaagtatctagattttccagtgttgtactcagtcaatttctaggattaggacaatggaagcaaggataatattaattttttccttgctaagggattggtggaaatatccaagatacagagccattctagatgtccacaagcagatgagtagataaagaaaatgtgctttgtgtacaccatggagttctattcagccatacagaaggatgaaattatgtcatctgtcatgtaatgggtggaactggaaatcttgttatcaagactcaaggaaaataaccagcatacactttttctcatacagggaatctagatttatctatgacgcgaaagaggaggagagagaacttcaggaatggggagtagactgacaagagcaaggaacaagagagttggggacagaggagacagacatcgtgatttctctcatttgtggaaaccagactttaaatacacatatgacataaaagcagaagggggaccaatggacagggagacaaagagggcaacagatgagcagaatgcaatgatatacttgaatggaaatgccattggaaactattattttctacactatttttagttagtcatagatatagagactgtttatgtagaaaaagatactctgccaaggctagaagatggtacccgactccatggagctggagttacaggcattggtgaaccaccttatgcaggtactggaagtggaattcagtcctgttgaggaacagcaagtgctcttaactgctgagccatctctccagcctctagctgacattcttcacaggttatgcatcaagctgctcaggattgtctccacgtttcttttataatgccctctgacgagaatctactcctggagcgcaagtgttaacacaagtggctttccatactgtccttcccatttccatgggcactggaccgtgcacaggactcagccctggtctgggatgtagtgatgggaagattatgacctttgttctgcagagagttattctagagtgtgacctgaaaatatcccaaagcacagaattttaagattcttcaccttcatcaggcagacattgtgatctcctgctatgagttgggatagatgtttcaatgcgttaagggtcatttcttccttcccaaacttcccttaagtgtagtttacttgcttcctgctccccatcccttcctactccccaatcttcctttttaatatttatttatctgtatatttagaatttcaaacacatacattttacattgaatatattccctctacattctcctacctggcttttatcccctagacagtttccctgctacttctgatctatttagagaacatttcaaagcaatagatcctctatccagaatatgtacataccattgttcatggaggtgacttttgcaactaggcatgttcaaaatttgaaactcgatgaaaaatccattgagacacaattttgcttaaggatctcgggagatggctcagtctacaatgctgagtttgatggttagcacccatgtaaagaaaccctgggcgtggtgctgcacacctataacctcagaactggggatatggaagtgtgagggttcttgaggctttgtgcacagccagtctagatatatctagactgagcttcaggtttagtgagaaatcctctctcataaacagggagagtgactgaggaagatacctgatgtcagcctctggcttccacacacatgtgcatatatacacacatgaacatgtgtatacatacatgatttatatttttaaatttgcatgaaagcacttacctatggcatagagtatagatatctttgagaattcttacactcaggaattattatacacattgaaattggattacaattaatctagaccaaagatggaataaaaagaatgcatatagaatggtaatatggtccttcaaagctttatgccctcaaagtaggtatgggatcattgtagagtagaagagtaggtgtgaactctagcacttactgcagggtgtatcctggtctggcttttactatgaagccactagaaccttaacatatgctagtgaattgtttatggtttgagttttagaatgtataagtggcaagcctagttttgaaagtcagaatatgttgcatttgtgcacaactaatcttcactggttacacaaaacttagtggtgatctccaagggtttgttgtttcaggtgactgggaggttgggagaactgttggggagggagctggtgttcacgaaagtgcagcagagtaagagaagtgagcagtgcggttagggcctccttactggcctccagttttctcttggaccagctccagcttgagccttttctcctttctaaaattccctttgttatgtcttcccttggctctgtcccaccctctggcctctcacttgtatgccccagtgttctccctggctttgtagcagtcagcatgagagtcccaaaggacagttccagttggatcaagcaaagcacaaggcgagtctcatcaccatgtcccagttcctcgggggtttactgatgttttcttagactgttcccattagatagctgcattgtcagctggagaacttctgtgacctgaaggacagaagggagaaaagccattaagaaaaggcagtgaggaattttaaaagtcaggatgtctttaaatagccttggctgaagactgttcccatcttttctgtaaaacccttccctgatgaacagaaaatagacggcatttttttgctctgacagtttctcattgcttttccagtgcagggtgatgaacaacaagcttccttagtgtctatgggtattattcattaatccacttgattcatcccatacatttgttagttgggaagtgagttagtgatttaggacgtgtagccatcatgaaagctagcaacccctttataatttatactgtttcctcattaaataatgggaagtggcagatgatttaattctgcctttctacaggaatggttaagggtgatatatgagcagttgcattcaggtagtgtcatttcatctctaaagtttagcaagggtctccaatgttattgcttctctgagacacattggacaagcaattgccttgagcatatgttaaatacatgggtatcaatccacagtccatgggttggaggaacctgtgtgtgtttattttgcatggcatagaaatgcagcattgtcatctataaagcttctgcttgaaatatgcagttgagttataaaacaattacttaaaaaaatctcatagttttaaaagaaagtttacgattttgtgttaggccacacattgttatccagttcctccatggagtggacaccttgttacatgaaccctttcaaattccagatatttttgtgcctattacaattcagtattctgaacccagataggaagtgagaagcaacaagacgtaaatttatcctgaagctagtagggaacattgcccagggaaagtgagcctagaacggttcacagctatctctgatacccaccaagaccaattttgttatcatctcaggctaaaattcaggctttgtggagatgatccctatctaattaagacataaaattagtgagctccttggtcacattgtgcaatcagcaaaatattttaaatttttttctatttaatttttatttgttgtgtgtgcactcaagtgcatgctgctttttttctttctttttctggagctctgtttctctcctgggacacagtgaagtgcactgaagcctaaataattgccctgtgtgatggactctgagatccaattcaagaggcctgaagaggtcagcaggcaccttattctaaaaatctttcttttgaggagacacctgtttttcttttagggtgccaatcattacatgtgtcttccagcatgaccacattttcagccatctggagtggctgcttcccattgcacaccggcttagtcactgtacacaaacacatacctttgcctaatcttcaacaccagcctgaaaacactgccatctcctcaaccctttaaagttcatgtgtattttctctaggacattgctagtctcttttatttgcagtcagtttaccagtttctgctcatttgaatgccaggcaaaacagaggggatagttgtttttgttgctatttttgttccttagagtcatggtgtgggagaaaacagagatacactattctcacttcctactatgaaataggcaggcctactccaaaggagacccccatccagcaccttctcatttcaaagctatctatggagggcaattatgtggactcccacggaaaagtattcagaaactccttttgcatttaactaaagtatttcccatttcctctaggggtcagtggaacatttcagtgtgggatagtcttggatgcaggtaagagccaaggtctctgatttaggcaccatctggttcaaatctggtctctgctgcagatgaattatttagttttaggcagttgcacgactgtcttgggtcctagtttcctcctctgaagactgaagaaagtgcataagcagaaagcaatgtttgctagcctggctatcctcatgcagtgggtatctggacggtaatgtttatgagcctgactctccacacacagtggatgctatctgatgaacagtgacctccacatatactcaaggggagagggagccaggacttacttgggttcaactcttcatagccattagatagtactgtgtgcatgttagacacccaggaattgtgtatatgtcatgaacaaccaatacaaagtttctccaatccctgatcctttactgtggaatggctaatctagaaatgaccctttgcacaatacttgtgaggaatatttatcttattctgttggagaatgaagttccttctagaaaaggatgttgtttagataagtttctggacctaggaattatgttttactaataattcaacatttcagctcaaatatttcatctggttgtatgctttgtgctttaaacaagacagaaatctatgtctctcttttattaacaagctggagaacagccatctctgcttgtggtacatctctgccccatgtggtctctcatcgtccagactctgctggtcttttgactttgtttttgataaacaggcactgattgtacatagtgagaacctcagcatgattttagctgcatcttaaaataccttcgaggggagatgattgaagctgggtcacactttcttggtggattcaagatgaaaaacatgggcaggtttagtttctgttccttaagcccaagtcaagcactgagccctggttactcagtgaaagcagaggtgaaggtgcagctgaagaagtcaaaggctagcacagttccttctcatttgctgctctggtgactaatgccttcagctttctccctggagggtttccaagctctttgccagctgttcaccttgactctgcctgattttcaactgtggctaaatgaggcagcagtttatgccagctcagaagcagaagtggggcagttggcaaagcatgctaccattccacttaaagagacaccgataaacctacacttacattcatttagttccattagtttcttttctcagaagtgcagtagaacaggacaaaaagcccaggagaaggaagacagtggaccctcagggcctacaacacttcatatagtttggttcatgcctggctctttgggagttttggggtttccagcattgacactaactgtcacaatatcagtgtttctgactttggaagagcctttgcccttcagtgacaataatgaatgaatgcatcagaatcctttccactgacctattaagatgtccctgcctcattggctccctgaggtacttctagaggagtattaggtttcttgcactgtccctttccatgagtcccccgctcccttgtctgcagtagtctctagtcttgaagccacacttgccaactatcgcaacttctaccttccttgactccatgaaatttcagacaagcttgccatgtttcacattctgtacctttttcctggctgctttggtttccttcacagtctctgtcttctcatgaataagatgagttggtgtgtcttgtgatcttgaaatgagcgtagggaagacaccctctcatggaatgaaagctccctagctctctggaaacagtccggagagggctgcaataaacagcatcatgtgcaggttgggagccacactactgctcagatggacatttctgccttttctgggttggtagtttcattattagaatgatactcttccagaatcatgggccagcttgggtttacagagagcgcaatcctttcagggttggtctgaggaaaaggctacgacttttcacagtactgctgcttgaaggaatccaaacccagagagggttttcacatcttggatcagtggggaagacaggagtgcttcgaacttcagaggtcatgtgaaagaagggagttgcgtatttcacacacagcacctcctgttgctttttgtctgctgtgtttgggttttagcaattgtggaagatgaacaatcccacaactgatgtaatttcaggaacagagataattttgaacctttgatatctgatatctaaccccgagagtcatttctctgggtcttccttcaagagttgcttagaaagatatagataccaccagagatgttgggacattgtattttaagcctcaaatgttttcttttcccccctcacttaaaatacctcaaggtaatgtcatctatgcctgaggggagatcattgacaagtagctgaaagttaagtagtagggagacagcagatcccagaaaaggtatgcaggagacagtgttgcttaaagaaaacccaaggatagattttggcaagttcagattttgttttgttttgttttgttttggttttgttttgttttgcatttgtgtgtacttatgcattgaagaggctttggcatttgtagttgtatatgatgggttgtgtcaaagaattagcaacaatgaccatgagcctctaagagtgggtagcatgatactaaaatatggaatactttatttttcagtaattagtcaaagtattatcacaaccacgattgctactcctttcaagtaggtgatggatgctcttgttttcatcagctagcactccattcggacaaatatggaccactctctttctccctcagtgggatgtgaaggtctttcctggacaggatggggaggagagacaacctctactcacattggagtgtgtgtgaacctagaccataaaagtctgaatcacaaggacagatggtggtccttcagggtcactagagcaaaagggttcagagatagaattagggagtcagagaccatgtgggcagtaagaagcaaatagatgtctgagtgaactattttggcaaatgaagaatgctgagacctgggtcttgggggtagacgtctatgtatttctaatgcctgtgacggggtcaggccagatctgtttatagtgaccagatgagatagagctatccagtctttctgctaggccttgtgaatatgagccactgtgactactcatatccaggcattccataagacctttacacatgcatgcctgtcactacttcttcacacagatccctttaggtaaatgttctcttcattgtacaggaggaacaacttcatggtgtggggggacacagccaagattgcatgggatgtagatgtgagctaagttcctcctgtctctaacaattatgatatttaaatatcatattcattatatcataaatatttaagtatcataactattaaaatttgccatccttttttaagctacctacatctattaatcccttgtttcatatgaattaaaacaaggggttcaggggcaggtggtggtaacacacacctttaatcctagctttaggatgcagatgcaggtggatctctgtgagttcgaggccagcctggtctacagagcgagttccaagacagccaaggctgcacaaggaaacaaataaataaataaataaaaacgaaacaacaaaaaccaagcaaaaccaaacaaaccaaactaacaaagaaacacaaagggttcaagaattcctgttgtgtggcccaactttctggacagtagggaatctctggtagtaaagaaaagcaacttgtgcttccctctcaccaggactcctcacttctttctgctcccttgtccctcatgttgcaaggctgaagaatatggggtgtaacaataaatctttctgccaagccacccaaaccccgccgccatgtgggtgcccaaaataacacagagacttattatattaggtacagtgctgctggccaatgactaggattacttatctgctatctctgtcttaagtatcaaccataattattaacctatatatttataaagacttatctgatcgagggtgccggaggcatgtgtcctctcttgtcgggctcacatgccagctccttctcttactacctttcccagaatcctcctcgactcctagtcctgcctaacttgctcccctattggcctacagtgttttattcaacactcaataagataaacatacacagaaggactttccccatcaatggggtctggagtaaatccagagcaccctcacaagggtaagttcctaggagggatgatgtatataatataatataatataatcctctgtaagaactcctggagaaatggcggtatcgaggggaaatgtctactaggttcagggtcactccttctgcttcatgattggagtagataatagctctcactgatacacttcaatagtttacagatatgctgtaccctaaatacatggccattagagaaccaggcatggattagtggtttacatattagaggcatcaccaggcagatcaactggtcagtaattgctactgaccatgggaggtggaagatgactgtaaaggaagtgtgcacaaagaggaaaaatgttcatgattactttagaaaaatgcatggcttctgtctgtgtggtgaggccatgacaatgagtaaataagtgaattaaatggagcgagtaaaatgcaagaaactgtgcagaaggagctgagggccagcgtgttcctggctaggcaaacgcggctgaggagtggtctggcggagagtgaacagggcttcaaagtcatgaaggaaccagaatgaatcagtgcctatttctatgaaagagagagagaaagaaagaaggaagagaagaaagggagggagagagggaaggaacgaggaagggaggcaggcaggctcttaaaggaagtgtagggcagtgtgtgctgaaggagggcattgctagctgctgtcaaggcctgcaccctatagttctcttctatgcctcttcctgctcttcaatttcctcccaaagcactgatcagactccagctagacaccctgtctctcttttctgtcctatgttttctgtcatttgcttcctgcatcagaatgacagcagtccagaatgaacatatttgtttcttgtagacatacttgttgcttctctgccttgatgcggtgacagtggtgggaggtcaggggtcacacacaactgtttcctacaggattctcatatgtacagtatgtacagagcatcataagtggtattagacacaacccccaattatagattaaaagaactgatgaacaggggctggcggagatggcttatagggataaagaagttgctgctaaatctgatggcctgagttccattcctgggtccaacatggtagaaagaaagaaccaattaccactactttgtcctctgacctcccccacggacacacatgtacatctgcacacacagatatttatgcacacacatatatacaccatcacactaaaataaataaaatgtaacttaaaaataaaaagcactgatgaaacaaaactgaaatctagacaatatttttgacagctgatattctattctgagcttgaggtaataacaccttaaaagtaatttattgggaagcagacagaagtgaaaagataatcacatgcaatttcaaaaagtagaggtggaagtgagaaaaggattaattctgtcatatatctaattgtctcattgcttttctttctctttgaataggactacatgtcactttgctgggcagggtgacatagattcctttgtgacggagaacagaaatgccaggcatgtggcaaacagcttccatcccagcactccagagacagaggcaggggaatctctgagagtaccaggccagccaggactacagggtgaaaccccatttcataaaagaacaacagaacggaacagagatagcaccctgaaagttgtagccagcaaagtgctccatcccctctttatatcaaatgaagccctgccctgcatatatctcggtgtctgctttcctatggaaggtgtcttgtctgaataactgtggctgcagagtcactagaccagtctgtgcagtaagggagttgacagaggaattgtccgtatggcacctgacctctaaaaccaatgggcaagtaagtatattgtcggtgacaaaattccatcacaaccactcacctgcttgaattatggtaattatctttcttcctctccctgcactttgcaagagacactgggggcatgacctttagtaggatataacattactaaacacaggatatttaacagatagcatgtatctgttatttatttagtgtgtatatgtctgtgtgcatgcatgtgtgtttggaaacatgaattctcatgcatgtcgatgccagatgtcaaccttgggtattgttcctgagccacttctcttgagacaggatctcttattggtctagaattcaccaatcatgctaagctggcaagctagccagccccaagggtccacctgcctctgacctctctgagctggggtttcaaatgaaacaccaagtctgactatttttaaaatgcaggttctgaggatgggactggggtcctcatatttgcaagacaagcatttttactgactgagccatctccccagcccagtaacctgcaaccatatgtcagggcctttcttccagaagtcttataacctgtgttgttcctcccttttatacgagtgcctcaagacatgggcgatttaagtcattcacccagatttcccggttggtgctgacaaagctgtgtttgtggaactggtgtggcacgctgactgcagagaccacatcccccccgccctttatttcaacacaatgttttggatttacttattttatatggatggatgtttttgtctgcatgtatgtatgtgcagcccatacatgcctggtgtctaaaggagttataagaacacatcacattctctgaaattggagttccaaatggtggtgaggcccccaagagggtgctcttatctgcaagtgctcttatctgccttctctctagctcctgacacccacattctttttttttttcaattaggcattggcttcttttatttttaaactattttacattttgagcttataaaataattacacccatttccccctttcctttcctccctacaaacccttccatatacccctctttgttctctttcaaattcatggactcttttttaaaaagtaattgttgttgcatacatatatgtatatgttactagatacaacaaagcatctaatttggaaaatgtatatgtatgtgtatgtattacatatattgtctatgtatatattagtcagaataatagaagtaagttcttccctaagttctttagcctgagatttgtaaccataggttcttagttcaatagtggtaccaggaatgcatttcaactcgtggagcaggccttcaatacagtcaggaagtggttgggtgctcagatgatgtttgtatccctgttgtactggtagtcatgtattgtcaggccaggcattattgtagcaggatgagtgggaatgatggttacttttctcctccagtagcatgtctagaaccttctagcatatatttaaatgtacacattcatacacatatatagagctatagaaagacaaaaggggacaagataaaaaaacgagagacaaaagagtggagggaagagagagtgggcgagagattttcatggaagaataatatctcatgaagagttagcccatgcaattgaggaggctgtcacatcccaagagcttctggagaagcagcacagtagtcccaggaggactgatgctagccagggtgtgagcacaaagccgagaggcaaaagagccaactctccagctgcagtcgaaagctttccacgagcttgggaagagctaacatttccttcaaggctgaaggtaagagggtacagctggcaactcttgagcagagagaagcacctcttactacaggaaagtttttttttttcccagattttttaaaatttgaattagaaacaagattgttttacatgacaatcccagttcccttctccctccagtcctcccctaccaccaccaccccaactaaaaccctacctatcacatatcctttctgttccacctggatggtgaagacttccatagggtgtcatcagagtctataatatcctttgggatagggcctaggcccactcccgtgtgtcttggctcagggagtattcctctatatggaattggctccctagggataagtactgaactactacagcaggtcctgtagatttccaaggtttcctcacagaaacccatgttcctggagtctggttcagttccatgctggtatcccagctatcagtctggggagcaagattttcccaatgttcagttcagctgtttctgtggattttaccagcctggcctggacccctttgctcatcactcctccttctctgcatctggattccagttcagttcagtgattagtgggtgtctgcttctacttctaccagctgcaggaggaaggctataggatggcatataagtcagtcatcaatctcattatcatgggagggcatttaaggtagcctctcctctgttgcttagattactacaggaaggttaacaataaataatcaagcccaggactgaagtcaataaaatacaaaccaacataaaaacccaacccagagctcacattcttaacctcaccctgccagtcctgctacctgcttcaggctctgttcctggaggttcatgggctgagtcccatggtggtcagacagatcctggagatgtcctatgctagagtcagcacatgtggccgagaggcactgatggacgtgcaacgtttaccaattctgtgttcatctgacagctcaaagttggcacactgggagaatttataccgcagaagaaaacaaaaaacaaaaaacaaaaaaacactacaagtcaggactttcctcccaagaactggttgttcagaacttcttgggattctgctgtctggatgtgctttgtataagaaaaataatatgatgaccatgtgcttcaagaagattcaaacctcttcccagatggcttcgggagttttgcagagtagtttccaaatggtgtctcatagcactttcatagcattctcttaatagctacaagggaacatttactgtgtgcaattcaaacatatatacctattaaaagcaaatatagtaacatgacattgctggaggcatggtgcctctgccaacttctgcaagtggaggcatttgacacggaggatctaacttggcagagctccagggatctggggcagcatgacgcagggaaagatgaggtgctctgggggggggggggcacaggttcacgtcctacctgttacttgctgtttaatcttgggcaatgctttggtttctcctaactccatttttttcttttttcttttggtatgttttatttattctttgagagtttcatacatatatacaatgtgttttggttacatccaccttccctctgactctccaatctctctctgactccctaatccccctcccaacttcctgtcctatttttttcttttcttttcttttcttttcttttctttttgtgtgtcattgtttttatttttatttgttttcaattttttatttgaattacaaacaagattgatttacatgacaatcccagttcccttctccctcccttcctcccctaccaccccccatctaaagccctacctatcacataccctttcttctaatctacatctgactcaaaatttctgctccctcatgacctctgcatctttcctcttcttcccttctcattcttgtagctccctcccctctcttcccatgctctcaatttgctcaggggatgatgaccctttccccttctccagggtacaaagtttgtctcttttagggtcctccttgtttactagtttctctggtagagtggattgtaggctggtaatcctttactctatgtctaaaatccacatatgagtgagtacatatcatgtttgtcttttcctgattgggttacctcactcagaatggtttcttcgagttccatccattttcttacaaatttcaagatttcattgttttttttctgctgagtagtactccattgtgtaaatgtaccacattttctctatccattctttggttcaggggcatctaggctgcttccagtttctggctattacaaatggtgctgctatgaacatcattgaacagatgtccttgttgtatgaatgtgcttcttttgggtatatgcctaatagtggaattgctggatcttgtggtagactcattcccattttcttgaggagtcaccatactgatttccaaagtggctgtacaagttggcactcccaccagcagtggaggagtgttcccctttctccacatcctctcaagcataaactgtcattggtgtttttgattttagccattctgacaggagtaagatggtatctcagagttgttttgatttgcatttccctaatggctaaggatgttgaacactttcttatgtgtcttcagccattttagattcctctattgagaattgtctattaagttctgtgccccactttttaattggattgtttggcctaactccatttttaaggaatattgacaagctaaacctgtgatggctctcttcactaacatcttcaataagtgttacctttatgtccttccatagatgccttggggctagacttcactccaggtgggtttttgttttgttttgttttgttttttgcttttttgttttttttttccaggtgacagggaacctcttactgtctgagtcctgatatgtttgaaggatgtggatgaaatcgtgagagcagacaagtattccagggctgggaaccccattagtgccacaatccaacagcatcacaaagtactgaatggcaactgtaatacaaacagctggtagacacaggccctgaagtgaaccacaacatccaagactaaaatcgcaggacaggcacattgaccagattggacagactcaaatgtgaattcccatctaagtaactcaaagttgttaattagtaatgcaggtattggaagcaggatgagtggaaaataaaatagaactcaatgtatcactttcttagctactgtgttcagtttcccctttgctcttagttgtctttttgctctgtcattccagcttagtctttctttttctctgtcattttttacttcactatgtgctcaggagtaaagaaaccctggtgctagttgcttctgcccttgcaaccagtcccaaggcaccattagaagcaggagtctggagcgaagggacactcaaaacctccttctgtcttgccccctttccaccttgctgctttttttcctcttctttgaccccacagtccaagacacattcgtccaattggtaattataaatattagagttggcagtgggcagtcgggatgcatggagcaaagggaccctcgtacagagagtagcggagggtgtgcggtaggtggcgctctccagccagcaatgctccgcgggattggcaaggtcagagtgcaattttattccggaagtttgaaaggagatgcttctcggcagatgaacgcacactgttccactttacctggttatagtgtctatccacctcctccaccaacacaaccctgtttcataggtgctgactatcccggttctcctggtactgctatgattaaaaccaaaaccaaaaccaaacagaacaaaaaatcaaaaaccaaacaaaaacacctcgaagtacctaagtcttaacatgtccaatcacttcacccaattttggatttgtaaaatatacagactttgtacaagttactttctagctgatctgaaggaatggcctcatcagtggttagcagaaacccaggcctgaaaacacccatcatctttcccctttaattgactttcagtggcatggttcttactttaaccaaaggcatgaggaacttcaggcagattcggctggtgaaggagatgctcttggagcaggtgaatcatattgtaccttctccaaagagagttctatatcccaacacaatctctgaggacccttgggcaagcttgtgcctacttgtatatggggtagtatattcagataggaaaaacccttctgtggtaacattctagaagggctgttgctaacattcctggctcagaccagcaggatctaggctattagaatccacaggagagatccagcccaaccaattatcatcaagacatataaaatcaattaaagcagcaccaggaatgcgttagttgcaagtcattcttgtctcctcaccttctggcctaactctaggattttgtcttagcacactctataaggcagtggtcacttcttgaatcagagctcttagcctacttgtgaatgtgtatgcctctactagcagttgtatagcacccacccttctaagactagtttctgtctttagttcccttctcctgtgctctttgaatttgtgggatgctgaaactctggagattttctttttttcagtcagcttacaactctggtcatctgatgactaaagtcaccccatgccatctttttttttttttttttctctttcaggtgctccagtgaaggcagcataagtaagtatctaagtctttcagttacgacactctaggctgtttctcttctgtgttcacggagctctttaagatttttttcctcatgcagctttatttaaatctagacagaaggtcttgtctcaccctggggtgggggtgagggcatgacagccatgcatcgtggggcatagtctatcttttgaaagtctgtagctctgttccgaaagggctaccaacacaaagaaagcaggccattttactcaannnnnnnnnnnnnnnnnnnnnnnnnnatggcagagtccatccctggaaactgcattagttactgttctcttgctatgataaagtatctgacaagaatccactgtaaagggaagattcttttgttttattgttcaaaggacatagtccaccacagccgggaaggcatagtggaagggagtgtgtggtgaatgatcacattgcatttgcagtcaggaagcagaagcataaatataagcagggcctggctgtgagatctccagtccaaccccagtgacccattttctccagccaggctctaccccctaaaggttccacaatcgtccaagacagcgccacctgctgaagaccaaggattcaaacacacatgccagagggagacatttcatatccacattgcagcagaaactgcatgtattttgggttctcctcccctatcttcctcttcccgtgagtaaaaatgcaaattgagactaccctctccccataggcctttcgccactatgctaattggcttctgggtacactggaggaaggaccagtgagcagttccctgccccttccccactcagtaaccaagctgcatcagctttgccacgtgctctctcctctctgtctctgtctctcctcccctctttctttctctttctccccctccctagactatgtttaaaatagaaaaggtcagtcttgtgtcgggtcagagactagcatttggaatgaactggatccacaggggctcagaaggattaactacagagggtggagtaagtttcttttgacctctaagatgcatttgtcatccaagtactgttatttggaaaaaccacagcttaaatgtcggagactgaatgtgtgtttgtgatatatggtgtgagtttatattgtgggtgtgtgtagatgtatgtgtcaggtggggttgtgtatgtgctatatgtgtgtgtatgtgtatatgtgatatgtgtagatgtacgtgttgtgtgtggctgtgtatgtggtatgtatagtgtatgtgtatatgtactgtgtatgtgtgtgtgctgaaatggctcatctgtcatctcttaaagactcatcatgacttaaagcttttttcatccagcacataattatcattatatactgaattaacttgaaatgacagatatctgttttatttgattatcactataaatcggtcatattaaaatgctgctggtttattgacttgtacacttcaatctctgagctctctggaggccagaggttttaaaaaatcaggagtatactttgtcttgagtctgagattgctctctctggaggagagccagcctggagagaaatcttttctccaaacctgttctgatgctcccccttgctgctgtctgaatggggggcttgaacactgagattcttggtttggggaagcttttgttcatgggtgtgaagcaagtgaggtgctccagcagcttagaggactccgcagcacttggcgagaagggactcagagcactttctgacggggccattgaaaagtcagctctatcaggctgctccaccctttctctactaatgaaaataaacgcagttctggcacaccagctgtaatctggaaatgggttttagaaatccactctactgaataaatgggctattacagcccatcattatggaggccaagaaggtacattagactagagggaggtgggagtggagggggcagggaggggagttaactatttcaagatgttgatagagcagaaattttagtctctaaatttttatcttcctaatgttcttactgacagctgaaaaaaatcacaatgtcaagaactgtgaagggctgagcttctttctttctttctttctttctttctttctttctttctttctttctttcctacttgtaagtgactacattagccagctagtttcttagctgcttttcatagaacacacaagactctcagggccaaaacaaagggcatattactcagagtactagaaataggcagagtatgagactagtatgaggacagggagagggagaaggagaaggagagggaggggccgagttttctcagtccaaatagccacagggaatgtgaagaaggctgggcagcatctgcacatggagtcgactgtatagccagacaggaacttgggcatttagggactttaatccatgatgatgggtagtaagctcttcttgcctttacaggtagtgggtgtagtctgtctcttgagagtgatttctatgtagacacctttgggaagacagcacaactgaggtcagtatttctgctaccgaaggttagggttagggttaagattcgtgagctctctcaggaaactgtcttcaacacagaactcatggaagcctgtggcgtctccacccacttaggctcttccatctgaactgcaacacattgtttcaccacttccagtttctgctctcacaccaggcttggaattaggctggttatctttcttctcctggaatatgacccttgaggaataccagtcatctttgcagtcaggaagttagcagagcacatacagctggtggaaggaagtaaccggggctgagggagaggagcaacaacttgcttgccctagctatgttaggagaagctagataggggaggggggaagggcagcatgtagggtgcaatggacaaaaatcaatgagcaagagacagggggtggggtgggggccagagaattgtcattctcctccttataaaaggcgatatattgtggagagagagaggtacagagaacagttatctgacaggttaacaactactgtttgtgacaagcagattgtcaagtagaaagaaaaagagaagggaaaggaaagaaagggggagagcatcccacagagctcaagtttaactgcattagttagttttttctcttgaatatttttaatctgccacttccaatagagccagggacagcactcagcatcgacttatgagaaacgaagccatgagtcatagactgctggtaaggttaaggctctggaggaaactgccaggcagaaaagaaaccaaaccctcacgcacagagctagctgcaaagataaagaaagactcttgctgtaggaaagtccctctaacgtagtgaatgaaaacatgttatgtaaaagttaagtgtgaagattcaatgtctacaatttacagagaaatttaatccggcttgttcttaggctatatgagggactccactggtgccagcataggaccttcactcacgaccttcctgctagacttggtgagtgtcaccttggagctttctaatcttgatggatctttttaatctcctcagcatccagacaaggcttgaccaacgttcctaataacacagtagacaggtgtggaagtgaagtgtgtgtctgaacctgatcatttctgcctaactctgacctgcagtggtaaaattgcacttgcttgctaaagacactgcctcagcagtcttctttcaggaattcttgcactctgatatttttaataagcagcaaaatttcttcatgaaacactgtgtactttctcatcttcattggaatgattcaatctaggtacttgggttttcctgtagaccagcttcatagtctgcaaatgttacagaatctgtaaacgtgattagatagtgagtataaggctgggtcctatataaattaataattactacataagtagcatcctcaacctactcttctttcctaaggaaaggataactcaagttagccctgtataaaaaaaggaattctagtagttttctttttagttcaaactcccagtatcatcctggtccctactgctctgatttgatatcacatccttcctctctgtagtttccccatgtagtgtatggacatgaactttgacctcacatagttcagtgattactggcctcctctgttctctctgactttagatgccagctctctaagcctggagacctctagaggttcagaatctatgactgtgaattgtgtctactcaactggcaagcacaaacaaatgagtaattctttgtgttcacttgaaaacaaagctgctgctgctgctgctggtgggtgccttcttccatagctttaaaaaataaaagaagccatgaatttaccccccagatccccttcttccaaaaagtgttctcatatgcatttaaagctagagaaagtgggaaaacgagaaaaagaggaaatgtcctaaacttaccatctctgatgtacagagaacatctctacttatgtattccatcattatgtgaaattcagcatgcttaaaccaaactctccatttccttctcaaagcagcatttctgattagcgttcctatttcagatttattcccatagcttcctgagcacaaaacccctgagtcatttatcacagccgcctcttccaaacactcatagccaatcagtaatcaagtcctgttgtttctgccttcaaaataattttcatatctttctctttctgttaccatggataccatcgaatctccctttttttgcttcatgcctggacaactgctgtaacttctggagtctcttggctcctatctagcctgcatacagctgctgctggaatgaatccctttgttatgttcacacatacccctcccctgctcgggacccttgagtagctcccttttgttcttaaagatcaagttctttaacccacatggccttgcagagttggccatatttaaaagctctgctaatttatatgaagtttttgtgtgagattaagatagtacctcccatccctaggctagggcaccagtggggtgccttagtgagtagattacacttctcaatgaattataacagatttgtatccctgatgcagaatgcagagaccttgaagaacagggcatgtcatttggtccccagtcacttagaggaccttgtagaacaatgacttcatagttacagacagtgtattgcagtctacctgctcaaaatagttgctctggaactcctttctttcaattttgtcttggtgtatatctatgcatgtgttcatgtacatgtgtgcatgcggacatgggtgcacatacatgtatatgcatgtatggaggacagaggtcagtgtggttgtcttcctcagtcactcccattcgtattttttaaaggcagaccccctgaccctgaaactcattgatttggtgagactgactagtcagcaagccccagggatcctcctgcctccactccccaagctctgggattacaggtgtgcaccaccatgcctgtctttttacatggatgtaggacataagcacaggtcctcatgcttgcacattttcctaagtaagtcaccttcaccaccctcaatacatttctaaaataaccttgcttttccagacaatgctgtacttgcttttacccaaattctttgactcatggctttcaaattttttttgaaatataatttagcttctttaaaactgtataattcttgtttgctcctcaaaattcaccacaaccattatttctatgggaaaactttttactctctacatctagaaacattgtatttctgatgttctcatactactacatatttagttctaggccacgaggactcagaattggtcagatactatgcatagaagctatgtatgttattttcaatttttttaatgactaattttgtctcagtctggaatttctgccaatgctagaaaacagaacacattttaccttcaatgtaactgtctcctagataaataaccagtcattccaaatagcctaactcttgcctcaaatagtgatgtgacctggcttcggggcaaggcttgtataactccagtgtccgggggctgctgaggaggcagattgcttcacgctgtcctctgcctacttgggttctcagcttggatctgctccacttgcatcatctcacattaattgtgaagggttcacatcacatctgctgttgagcatctctggcttttggaacaggttgtgcttttccaagatatgatgcatggtggagtctctaaaagagcttggcttttgtttcccattcagcaggctccaccccattttgtctttctgtacttcaaattcccagagactcccccaatgaggtccagctaatatttggatggagtaaattaatcatccagcattcatggtgcatattttctgaaccacccatgaatgtctagatccttccacgtgatctaagtgcctagagaaggctgggtgcacagcaccacatctctgcaaatattccttccatattttgttgctctaaagttccaaggctagctgggcagcctgagaaagcagagcgtaagagttgcttgtgggttttccttcaacacgtctgagatttttactgcattatagatcatggtgaaatctacctgcctccatgcacacctggcctctgtgctgagagtggactcagagacccatgatcaacctctccccatcctttatctctagatctcattgtctgactgttgtgcctcaaatcagaagttcttttcactttcttcttgatccttagaagaacagcgaaaccccaatgggtcacaaacacccaagtttccttttatctacaacttctgataaaactactttcagttctgaggtgagcaaacacattcacggctgcagtttgccatgggtttcaagaactctgctagcttttgagttatagcgaaatcctcccagaggaaacagttcctggtttagtagaagtcagtcaaacacaaaagaagattattaatatattatacaaatattatccatcagtatcctaacacttgtgctgtattatagccttctctcctgtccgttctcctttccagtcttgctttcctatggggtggggggatatgtcctactcagtgttaagtcctgatataccaacacctcctgtagggagaatcacacaagcagtggagagatggatgagcactgttctggaaacctctgggttcctaagcaactggcttgacagtgattgctgaggcataaattttcagtcctgctgcttagtctccatagtggccagaaatagacacattctgtgttgcgttcagctgctaaaggcagggggagtgcagaattcttattctatggagcagcagagggctagtgctgacctgtatagataaccccaggaatcctgctcacatgtaagttgtaatagctgtatgaaacttgtcagctgttacagtcacagggcacgtcagcgcccttcgagaagctttacatgtgcatatgtacttgatcattccctgagagctaaaaagtggcttctattgttatcctcatttcatatatgaggaaatgctgtgaagtcaaggaagctgagctggggcagggacacagtctcattaacaggtgctacagtccatatgagaatcccactaaagcaatgctagcagaatatctgcacctagagccactctgtcactttagactcaagctgtatccacctgttttatatcccaggcttgatgttctgagcaactaactctgttgcccaaaggaaggaaggttttcctcaaggagtggactatgcacagagggactcacaagcaaattcttcggaaagaaattccctaatgaacaaagtcagagacaatctgtgtccatgttccagctggctttacatgataacataaagcattgctttgcagaaagcagaacttacatttttctggataaaggccatctgtgaaataaacgaggtagaccaaaatggaaagtgcacctgagtcttgagctcagtcagtaccccctcaatgtcaccctacctgggaagcatgtggcacatttattgaactgactatattcatcagacttgtattacattctgctttaaaaaacttgtttttaaaaagtaaagagtgtcttaagaaaaagctgttttcaaaatatcatctggaacgtgcttggtggtattatgtctgcacacaaccatacacctttcaaagccactaaggggatgtctgtttactcattggccacaaatacacatcagtctttgttgtggagaaaaggaaggaaaatacttccttacaatgactgagttttccaagctaaaaatgtgttggggtagattatctagagtccctgaaatcttgactatcttatacagcttgctatatgtgtttgacagcgagtaagtggagacagggtgatctagttctgaatcttgactttatatctgtagattttgggcaaattagttgacttctttaggcttctgtttactcatgtataatttggggcatttgtagtattgacacctttgtaaatgttgtagggatatcataaataaaaaacaaaaccatagaggcaaagtggcatagtgcccagagtagagtaaatagatattttgttattcttaatactaacaggctggaaacatatgtctgtgttggtatttccaaatatgaccagctcttagcaatgagcaagggacagctcattcaaggatgcctaccttagaatataatcactatactgagacagatggttggtaacaagtaagtggatagatagtgacagggtacaatgtgacatgagagcagatgaagggactatttgaggtgatgaagagaaccagcaaaggtagtcagacatgtgggagggtagtatgtggggtacatggagaggtgtaggggagtaggatgaggagtacatacagaagctgggagatggctccaaggttatgagtacatactgattttgcagagtattcaagtttggttcctagcagccacattaggtggcatatagccaaacacctgtaactccagctccaggaggatctgacactctcttctggtccctttaggcactgcaattcatgtatacttaccctaaacacagacatctgcacccataaaaataaaaataattaattatttaaggatcaaaatacaatgaccaatatgcaggaatattctgtaactaaaattattacttaaaaaatgttatagcgatgctgcattagatactaagggcacagggtgaataggctcatttcttttaccctcaagggtgtactgtaatgaaccaatcagcagaagtgctgacaagttcatttctgttggtttgtactaggtgcaaggctaacagtgtaaaggaacactcaaatgccagcatgggaatagaacaggctgtgagaagggggcattttaaactagaagagggacttagtgagtcatggacaaaaggaacaacttgtccaaaaaaagcatgaagatgaagaggtctttatttattgccgattctcagtacattagtatgatactaagctaagcatcaggtgcaaggaggggaacttgggcaagagcctaaccatgtgggaagggatttgaactttcttgtggtagaacaaggaaaaagcagaggtagtgaaggaaaggaatttccttaagcaaagtgactaaagttggttttagaaggaccactccagagtggagactgcagtgttggaaacacggtacctggtcaggggacagggggtcagaaatgagtggggacagtccactgggaggcgagatgagtgtgtaagaaagttaccgtagaccaagcaggtgtgtgggaatgctcacagagagcttggaggtagtgcctgttcccttcagcaacactcgggggcagagacatggacgtgggatatgacacaatacgtgggcacacctgctttcttctggtttggacaagtctggaagaagtacacatcggcaatggcaagaaaatgtcctgacgtacaaatgaaaaaaggatttggatgggataggtctggggtcagtctctggacactaagccgatacccacccacagttataaagtacagttaaaaaaatacatttgtttcccaacacagcactgataagtaagtaaattgtaaattgggaatgagttctctgaggaaagaaacaacaagaaacttagggtcaagagaagacattagaatgggaactggacacagtagggcccaccaacgagactggtagacaagaaggaagcaggagaacaatggctgcagagtcccaaggaggaatgaaggcaccaaacagtcaggagtaccagtgccacgaaggttgggtaagaggacttgcaacactcgtgtggctggggactctaggacatactgagactctggggaacagaatcctggaagagctgacatggttcattgttggctagcatggctctgaaggaaagagaggctggaggatcttggcaaggaggatggaagtaaacgagctttttcttagtgacttcaaatattagtgctgacttaactgggccttctgcttgggatggacaaaaccaagtcaaaatcaaatagcagtatgttggcttttctattcggagagtcctggagttctgtgttattggcagagttatatttgcttatgtttattgggcttaggatacttatgtctagatcaactttcttgaattcttcattttgaagaaacggttttcaaagctacagtccttttgattttttttttttgtacaaatctcatgttcttttagcattcagtatttttaggttttaactgtggtttagcataacacacagttttgccttctcagcatgtctttaagtgcatagtttactagtattaactgcatggctcaaaagttaaattcacattgttctgaaatctatctctagaatgatttttatcttacaaactgaaactacctccctattaaccatctccccgttctcctctcccctcattccctggaaaccacattctacgttctgtttctaagagctgtttctaagagctgtttctaagagcctcccgcaagccagcacatggagttttcctaccatgataggtttatttccctttgcataataacctcaattttatagcatgtttcccagtttccccatgaaagattttaaagatggaaaaggtgaaaagccatggacaatgtagccacaggaaaagaatcattccatgtgttgagtttgggcaggttccatgtgatatttccccctttgagaatcatttgtatgagcctgataatctttgttctttcaactttgtaagtgaaaaagcaaatggatccagggataagtaaccctataaacatcaaagcatcagctggtacggagtgaagtcaaggctctaaagggggtgagcagagaggcagctgggcacctgtacaaaaacaatgaagagtacaggagaggagaacgtagatgatgaagggcccaagggcccagggtctggtcagaagcctcctccttatgagtcctctcaaagccacccgtattgtcatagaaagaggttattatgtgcctgaggaaggttcatggcaccctttagtttgacttgggtgggtgcttcaacaatatatggatgacaaaggaagggagcctcggcagggaaaccagatgccaacgaggcacatgaagcacacaggactgggtgcagttaggtgtaaatgctgagctggtgtttggcaaggccccggttctcaggggcattatgggggtattccctatacttccaggcctggccacctcctctaacatctctcttgctgtatattttgctgtctgcttgacatttctgcttagatgactaaaacgtaactccaactgcatattttcagtactgcatcagccttaattctttccccaaatctttgcctctattacactgccaaggtccagaaaatggtggcagtcttgactacgtatttaggggaaattctagtcatctgcttttggctcctgaagttctctcctgaaagacatttacctccttccatcttctctgaattctcagcccaagtatgatcatttcttatttaaaaccccttttatttaccttgaaaactttacatatgtaaatcaagtgtcttggatatacacactctcaatcttcccctccaattccctgttgggtctgtacccatcttcctccaaacattctttctttcttttcctttaaaagaaacaccccaccatgctgcttgtatatgcacaggtatgggaccaaacagtggccacacacccaaggaaacggaacagtctctctaactggacttgctgcatcacttttgcctacaccaatggtccaaaaatgtagcttcagattcctttaatgttttctcactgtacttgggataggatgaaattctccactctaggtctgagtccagatgagccctgtgacctcacctccttctcccttccctggagacttttcagtggcaccatcttctctcaccttaggctgttctttccaccaggtgcctttcccttcagatcttgtttccttaggacatttgtggccttagctcagaggtcttattagaagggtgggtctctgacacccagcctgcaagcatctttcacacctgtccttccatgctatgcagctttcttttattttccatccaatctggactaatcatatgtatttgtatgtttatcctcttactcccactagagtttacactccaaaggggagaaacttcatatgtccgccagccaaatgcctagaaggcgatcactgtctgctgcaaaagtagatgctcccaatggagatgcaaattctttccagacgtttcggggagattgcaggtggatagagcagacgggagccatactctctggacagatttctgcttccgtgaaagatgacagaagagcgcattattgggtaaattaacaacagcagctctggagtcttcaggttgcagggcaggtgtgtttgaaggggaaaacaatgtggtattgatctctatttctggctttgtgaagaaccaggaagatgaaatcagtaatttcaagatgagtcactggaaacaagtggtttcacagaacaccttgaagttttaaacagacggagacaatgaggaagaaaaacacagcaagctctcaggcctcataaagccttacagcccagagtgagtgtctaagccaggggttctcagcctgagggttgtgacccctttgagatctaacgaccctttcacaggggttggctgagaccatctgaaacacagatatttacattatgtttcattacagtagcagaattacagttatgaagtagcaatgaaaataatttaatgttgggtcaccacaacacgaggaactgtattaaagggtcacagcattgggaaagttaagaaccactgctctaagccacagcccggctacccaaggaatgagtccttccagttacttgtagatggctatcttcctgatagatgacagttaaatttttattgctgtcaatattttttaatgaaaaaaagatgtaagtttttttcctaattaaaagaggcacctgagaggtggtggcgcctcaggcctttaattcgagcagaggcaggcggatctctgtgagttggtagcctggtctacagggtgagttccagacagccagggctacacagagaaaccctgtctcaaacaaaaccaaacaaccccaaaaaaccccaaaaaaccaaaaccaaaccaaaccaaaacaaacaaaaaacctcatgagcttgagaatgggatacacctgggctgtgtccaagttctatagctacaacagttccataacatgggtgtgtaactgcgctgagctgctgtactgtgagaggagcctgtggagagttcccagaagccctgtctcgagggaggtaaaacagtcaacatgtctttatgcaccaacactgcttttctgtaaacaccccaatatcacactgttctttttctcccataatgtttaattgattctttgtgaatttcacatcatataccccaatccctctcacttctcagtccttccatatatgccctcctcccttgtaacctctctccaaaagaaaacagaagaaaaaagtctcccagtagaagctgtagtgcatcacacagtacacccttttaagtctcccagaaactgtagtgcttcacacagaacacccttttgttcaaccagctttgctcacagctattcattttaaggagtcattggtctggtttgaggcctctgcttctgctgcgtaacatccacgggcatcaagtcaagacccaggatggagcccagtgggaagagtttctgtccagcatgcatgaggcccagcgttcaatcgaagtcccagcatttgagacacagagacaggaggatcagaagttcaaggttatcctctgctacatagcaagttcaaggccagaatgaactacataacagcttgtctcaataaataaatgaacaaactaacaaatactagtcaattccaacttggtgttctttgtgacttctaagacattgaaatgccacattacaaataatagtcatatgacagcagctcttccccaagagttgtttctgggcctccaaaagcctcttatccgtggaggaacctgactggcaggttttccaagtttctctagtgaaaaactggactcaagaaacattgcaatgagaatctgattcccaccacaggggtaggagagcaggctctgnnnnnnnnnnnnnnnnnnnnnnnnnnnnnnnnnnnnnnnnnnnnnnnnnnnnnnnnnnnnnnnnnnnnntaggctacagttttctttagcaccatgaacaagtacttgactcatgaggaagtgcatttcgtgcaacactgcccagagatactccatttcctacaaacactaggaaggagacctgacgttctgcccccaccttgagaagcttctggaagaaagggtgaaacagcagacctaccttgaattttttttttttttttccgagacagggtttctctgtggctttggaggctgtcctggaactagctctagtagaccaggctggtcttgaactcacagagatcctcctgcctctgcctccttagtgttgggattaaaggcatacgccaccaacgccctgctcctatcttgaaattttattccttttcatgttagcagttccctgggaacatttttaaaagttggtatttttgacttctagagcaatcatgtttgactgtgtacatagggagaaaacacatattcatcttactgtgctgcctttgtatccagcagtgagagtatcttccaaatattcttccctcacttgtaactttagtgtttttaattaccatatattaattatacataacagtgggttttgtcacaacattttatacataaataatgtattttggtcttattgccccccccattctccttctgtcctccctctaacttccaactaacacacttgtaatttttcttatgggatatgaccttatcataccatcacctaagtgcatttttatttcttgtattataccttggcttgaaataccaaaattagccctctatggaatataataatgaatctgattttatcacttcaattattcataaattgtcttttccattgagcattggacaagacacaggaaaataactatgctacagggcaaagacctacagaagggcattcagattattccatttatgaaggatgcacccccaatgttagtctgcaggcttccattgttgctccccccagtctctgcaggattatcacagggggcacagacagggttgtccaaatctacatggatttcaatactcatttgacgtttcaatataatctttgtgctcttgaatctctatgtggcctttgaagccatatttacttttaataatagtagtaataatgggaataaataatgtgatcgagccagctattggaaaggatgcagcaggaagatggcaagttcaggccctgtcttggctacagagtgagttccaagctagcctgaggggtagaaaagctctgggcgttccctggaatgctccggctgtgggtttgatccctaagcactgctaagtctcagttgtataattaactctgctctcagtgcagtggacagagatatgaatctccaagactgtcacacagcatagcaggtggcaggtctttgtgaatgtaagtgactattggcttctccttcctattgcatgttctctctgcaagatccttgggtccccccccacacacacacacatagttctggggcctctgctgagtgctttgctggtgacattttcacccctttgcctccacagagagccacattatcacttttccatgtcccgctatctttttatctttctagacttttccatttcttgctgttgtgtttcttaagcaatgatgtataaggaactgcctgccatgcaatgagagttcaaaaattttacatattattgccaggtgctggtagtgcatgccttaattccagtagttgggaatcagaggcaggcagattgtgagttcaagaccagccttgtctacacagtgagttccaggacagagctagacagagaaacactgcctcaaaaaaccaaacaaaaaattatatattattatcatctgtatgttttagtgtgtatgtacacatatgtactcatacagcatatgtgtggaaatcaaagcatgactgtgtggaaggtctcttcttccacttttatgtagattctaagggccagatttggcttttcaggtttgcatgtcaagcattctaccctctgagtcatcttcaatctcagcagggatgtttcttctattttttcagctatggggtgagtttggggctcagtgttggtggctctctcacctggggttggatttctcagaaatagcctctattttgtttaaatttctcagccagttttgaatctgggtttgttccagattcttaacaggcccagcatgctcctgtaaggacattcaaggttttcctatacatcagttattgtaatggtacttaatattccacatgtgtggtataccagaatgtacagccctgaattacaggctgttttccaggaaggcttggtacagtccttggagagaatatgcctttgggctgtaaatgcttcaagaaagatgcagttatagccatcacagactttggaggatctttaaaacctattacaacaatgtagaggttgaaataagatgccaagaagtaacctttaggcatggtaggaggaagcacgcagtgtgggaaagatagcattagctgcaaattgttccagtgtggcactagaaacccaaccaaaactgacattagaagagtccactggttcatgccaccaaaggaacaggaagtgtggcggctgacttctgggtcagcatgatgccaaggttcttgctctatctccccccactttgctcctctttgtctgaggtgccctgctcaccatacagtgtgaacagggaagctcatatgacttactgtcccaggcccttgcctccatggccacctttccatctcagtggctactgacccttttccagtgttattagtccatgtaaatcatatgggagattctgactcattcagctgaggtctttcgcttattacatgataggccatgctatgcttgtcctggcccttgtcactcgcccagccctgtggtaggtggtgtgtgtgtgtgtgtgtgtgtgtgtgtgtgtgtgtgtgtgttgcactgaaattttaagtgtccctacaagttatttatttggtggaggtggtagggtgaaggttggaagaaattacatgaaaataaaaagaggaatctatcaagacaaaaataagagacatactgtaagacaatgaagagggaactcatgttttcttcagtttggaaaagaaaatggatgaaaagtagaataaatgtccaagaaaacccagaggacaaagaacaaatgtgtgaggaggatgcccagcaacaatgatagccattacaatgaacacttgaagactctctggagtatttgaaaattttaggctttgtggaatatagatagctaagaggagagcgtgccattaaaagtatggggaagcacagagtggaagtggttcaaagacagagaaaggagtattgttagaaaatggaattctcccaaggacgtgatttagattttatgtgcttataaacttagaatggccatgggtagctgtctggaagagtcaacctcgaaagatttgctgtggtacaagcatgtcctatgagaagagacactctaggaaatgtggccatgagctcggctagaaatcactctctgtagtctgatggagccagctccaggcagctgagcatcataggaaatttccagaaaggataccggtggcttactttgagctgaggcttatgtcaacatcaggaatcacacagacaacacaatacagggaagtggggctagcattcagctcttcaaggtccaaaggtttatgggttattctttctgtgggaaataaaagttgggaatcaaatgcagcaaagggaaaattactcagtgagaacaaagcatgccttccttatggctcccaatgaagaaatctgtcgttacactctgtgcagaagatagagcagtgaggaatgtctcctccacctgactgacacaggtggctggccagcatcttgacttaccttcatggtggaataaaacaatctaagttcatgtccctgtgtattaatnnnnnnnnnnnnnnnnnnnnnnnnnnnnnnnntgaatcctagccttgttcggatgtgacactctgactttctgagtcttggtttcctcgtttggaatagagaaacctggtctgaggacctagactttctgtttttagtctagtgacttctaagtgacaatgttttcccccttaacaggatggcaatggaaactgaatggagaatacacagaagtgctgcatatgtaggtggacagagaagggctggggcttatggtcagggctttgggattcaggaggaccatggcagggtccagcccttgggtgacaccctagacagactagtggaccccaccatgtccacatccttgtcctctgagcttccacctatcataccctccacgtcaaggggagctttgcagagggttaagttaggaccttggtgtcaagacacaatcctggttggttcagccttttaacaaacagtgggttgatgggaccgagacccaaggcaaggcaccttttctaaggaaaggaagtcagtttttttggagtcctcaatcaaagccaccatttttttttttgcagatttttttatttgaattagaaacaaaattgtcttacatgacaatcccagttccctctccatcccctcttcccctaccacccttctcccaactaaaaccccacctatcacatatcctttctgctccccctggatggtgaggccttccataggccaccaatttttttgttgttctttaaaaatactgaattacagccaaggctgttacacagagaaaccctgtcttaaaacagaacccacaaacaacagccaaacaaccactgaattctacaagttcttgactgacactctaaggataccatcactggtgccaaccagtcaggctgttctcaggggaggagggccttcagagggtgtagccagtggcattcagatgaacacctcaagttggaaaagtggtgagggaagtgggcacgaggaagggattgaagtgagctgtagtttcagctcaggctaaaagaaggatttttctctaagtgatgaaagctttcaaattctccctgatagcttttggaaatgtcctgtgtacattagtgtacatttaaaaacaattggtcttctcactacttagtgtaggatatactttgtttgattgtgactttgaagctccatgaaagcagtccgtgtcttcaccgttgaccatcagaggtggttcagtatgtggaacccatctgcatggctcttgatgcatttgtgttttgttgctgctgcttttagagtttggtcccaataagtcattgcctataataaggttctgggattttcccatggagggttttgtgtcaacttttctgtttctgcctttaatccagctctagttgagtggtgtatctagtgccagaggaaggtctaatttcattcttctgcacatgggaagatggtttctcaatacaacttactggagaaattcctgaactttgtattcttgacagtgaatccttgctctgcccaaactcaatctctcgcctctgcacacacccctccattgtccagaccctttcctgcccctggttccctggaacttggattaaatgccttctccatcctacgttagattgttacctctctcactggctattctgattctttcttggatctgatcacaatgtgtaatgagatgtacttatctgttctcttcccctcctgctgcacaggaactttttctgagaacaaattctttcagacagggaaacacaacacctgctcaaagcactcccacctgggcttaatactagggatggttccactggccagggtgtatgcagaagggtggagagggtggatttggtgccccagagttagtaagaatagagcccttgccaccctagtcagcagggggaaaatgactcattcctgggggagagagagaaaaaggaatggagaggcacctggcaggcatccccaatattgacaacccagttggccttgctaactccatgcaggaagccagggccacagagaccccgtgtttcttctcctttctctctttttcagctcctgcaggaagccggagacccaggatgttcagagatgtcctagagggtgagaaaggaggagtgggtagaaccaataacagacaccccatccacctaactctattcccaggactgagctcagaacattgagtgtacttattagtcatttgcacgtaatcacaattgaaaataaatgacgattgaatcaaacaaattagtttcctgccacttcttttattataaatcccttctcattagttttgaggagatgctgaggatatttgtcccaggcagactagtctaagctctttgaggcagataggccctgcaggcatctcagcttgaggaagtcttcatggcctgggaggcagtgactagcacacagcctctccattggggagctattgtggactttccattgttcagctgttgcagctgggaggagggtacttgacagaagtgagggtacagctctacctaggaggacagggactgactggcagttactcatccattctacttcccttttctgttcctccatcctgatggtgagaggatgatgtaacctcctgcagccaccaaggtgctcaatatggtggaacagcacctctggactgtcccatgttagaaatgggacagtcttatccatgccctcattctgcatcttgaagactgctgcacagcctgaatcctaaatggaacagagacatcctggcactaagggaggggtcccaagcactatcccctcagataagttgtgatagtctcagaagatggaatcaaacacaaaagtaagcagaaggaagctgtgctgctgggaccttcagtatgaagatagaatactgtatgcctacattataggagcagggttgacattggtggctaggtgggaataggggtgatggggcagaaggcacctagataagcttattctgaataggagggtttgttttggatattcattgagcagactccgagtcaaagacatactgtatctttaacaattttttgatgcagttgtactgggaaatatctcttatttgcatacttaaaatagacagggtttagtccaaagtcagaatcttcacgctttgcttggagatggcggatgctcagatggaaaagtgagggagaagcctggttcaggcaggcctaggctgcagtgtgtccctagagtgttgtgtgctcattccctcacacttgcctggctctcagctctcagggcttaatcaaaaccagagcccacagagataaatatgcaaattataatttgaattattcatttgctgaagagctatttcatacccatacctgaatttatatgattatcagagtatcttcatcttctgtttttgctgttagaggctgagcagactatgtttctaggattttaggatgaaactcatgatgggtcatgccatggatttattgccacatttggaaaacaaaaccagtaccccactcagcatgctccgtggaagatgcttgtcagtgttacccatgtaaaactgtgggatggacatagaacactgttccttagaaattataaaaggggactgattgtggctgatttagtggggtacctgcctgacttgcacaaagctttgggttcagtcaacactgcacaaaagggtgcacacccatgctcctagcactcaggaaggagaggtgggacgatcaaaagctcaaagccattctcaattatgtagttagctcaaggatagtctggactataggagatcctctctcaaaaaacgattaagaagtgacagagggcactaacagaaaaatgagaaaggagtgatgggatttgctttactgagagatgagtccaggttctaggaaaggggtttgtgtcatatgaagaaattatgttcgatttagagctagtagtactccacttactcatatgtgcagtttaattttaatttcaaatgaaccaagagtgccattttaaaaacaggaaatcatcactaatccagttaatatttattttagggcttgttgcatgatgaatgctgggtacactacagtgagctcaggagtctcttcctccttggagctggatttcacagatgtgtcaactctgtagtctcagagaatgttctagagaccgtgctcagatactcttctcaggaaaatggaacaactctgacaatcctcaccttcctttacttttaaaattttgttttttattatatatacatatatatataaatatataaataaatatatatatttattcctggatccataggcactgtcatcctgtgtctatatggtacttcaaggtaagttaaaaaaacagctctggctgggcaccaagatctttcttctttgttaggaatgtagtcatttgtttcactgccctgatctatttcttgcagagcataatatatgatgtatcttcagaaactaacaaagtatatctaattagaactggtactctagttcaaatctttagagggaagcctcccttctaaactctggtgggcatctccatgtcacctcagttttaacaacagcctaaattatagcatatgttgagtatttaaaatgtggtctcgccatgaagacatgctcagtacaaagacccgaagaacatggctcttgatctcaactagctgaaggtaaaggcacacagacatatacaaaaatcatataaggagccagcctctaccacattggtgtgaagagaagagctgatctttgtaacccaccagaaacagatggtaagacttcattgttgaagacactgcagagacaaatcaatctggaactgagctagaagcttcctccctgctgggtagcatttataatgccagaaagtgctaccagacggctgggggagaaaaggaattaacagtcttacccaaccatgtctcctgtgtactatagtactaacattctgggtaagatgtgtcctctggtgcaacagtggcatggttattttagggtaaccaattacttctgattaggtttgaggactgctccatgagaaacaatacatacctagtgctataacatcatcaaagcctatggcaggaaggtcacaaagcctaggggcagggagcttactgctatgctctactaaatagatgtataaccaaattgctttctacatatttatgcttctatctttagagtagtgctattgtccggagggagaagcttctctttgcagtgggaaacagttgacacagagaccttgagttggtgaaagttctgagaatgagtaactagtaactagatgcaggggacatctgcatcatcactttcaaggcccagagaacattgcattagagggtgcagaaagattgtataagcagtgggtggggaagaatattgtgatatgctgtctttggatatgacatggccactgaatcatgaacacccaaaagtgaggctatctacacaaagaaagagacatgcacacacacacacacacacacacacacacacacacacacacgtagagttggtaagaaggtaagaaacaggagtagtggggagtaagaaaggataatggggaaaatatgatcataatatatcatgcacatgtatgaaattgtcaaaataactgtcttagttcatgttctatcgctgtgaagagacaccatgaccatggcaatgcttataaaggaaagcatttaattgggcctggctcacaggctcagagatttagtccatgtcatcatgacaggaagcatggcgtgtgctggccgaagtgctggagaaggagctgagagttctacatctggacctgaaggcagcaggaaaagagacactgtgactggattgggcttttgaaaccctaaagcccacccctagtgacatacttcctctaacaaggccacaccttctccagcaaggccacaccaccaatgccatttcctgaagaccaaagccttcaaatacatgagcctatgagggctattcttattcaaaccgccacagtaactaattaactcaatctgccaagtaaggagaggagagaagggccaggcattctgtcagtgctgtccatttgtgctgagtggagagcatgaaggtggtctagaacacactgcactgaggcagcgctgctctgcactgcgcttccaccttcctcggctccgcacagggtgacggcgtctgtggaggacactcacgcaggctgtaaggattttgttgacactgactacagtttcctgtcatttgacttgttgatgctgtctccataatctgcaaattgaaagtcattctaccacctacatgtttgcgccaaacttacctttatagcatcattgctaagggatgcggctatttgacgaacccctttaatttgtattaacttacctccctccagattggctctgagtggaatttaaaaaagtatttcctaaatacactgtgttttttccttctgagaagtgtgcagtccgattaaggagagataagaattctacaggcacataatagtataaaatctagagtcaaatactaaatgctcaaagctattaggacaaatcagccaaccttgttattggaaagctttcatgatgcaagcaagaggcaaacagttttctactcgaatgaagtgaacagtttagaagtccaatgggactgtggtctgtatgactcctagaatgaggagagaaaaaagagcttgtggtgagccatcagagtaagctgggtttagaagccagcatccagcagtgataaccaccatagctcatgtgttctgtgtgctttaaaacctctgctaggtcccattcattctggttcatttagtctaggaggttcttatttctatttaataccatagtggcttctatttattatcataatctcattttccaacatggctgaaaaatccaaaaaagaaggctccgctatgctaccataagatgtattatgatctcagaagcagatggttggagtcatagtcttcattctctccttgagcctcttgtgtgtctgaatagtatgggaattttcctctataaagccctcagtgaccaacctaatgaccctctgcagacacaatgttttgaaatgtttttccccactcaggtcagattcccattttctccttaagtacaataaacttgcctaggaaacacttccaacaagcccaacattgattctctggggctttaatgtgtcatgctgcccatgacactattgtctccatggcaactccctcagccagggttctcatggtcagaagaaagataaatgcaaagagattgctgttgtgacttcatggctgtgattatttcttattgagaaggagcaaatgtgagaatcagactatggtggggataattgtggaagcttaaggctacattcttaggagcctttccctgtcatctctagactttcagtttttcctcattctcttcataagtctgaacttacttgaataagtaattctttgtattgaaaagtgaaaggaacatcaccaagattctgggggcctccatctgataaagactggaaactcactggctacgggagcctcagccagtcaatatattctctgtgccacttcactcagggatggaaggaagggagtcctcactctgtcacccttaaagggtagtttgggttgagacaagatctggatagttttaatttcccaaactcccccccccaacaatcagaaattgtaacacttacattttgtacacatgcgtacactatattttaataatggtggttactataagttcttctgccgaagaagagacctaaataaacatgtttaattctgccctgtccttcaccatagccatcaactggagaaggatgccagaaacaatccaccacagactctgctgttcagagaacagacaaagaaaatacatcctctgtatctggactgtgttcagcaaatgttggtgggttgccttccatataatacttactactgtgaatccagtaacaagaaagacactctttgccttttggtggcaagaacataggttcttacatttaagagaatgtaagatggcaatatgtgagatgcacagctgatagacactgcacacacaatgcccagcgggctcagctgagtcagtggaagctttgtgaatgcccagagaaactgaccattttaggctcaagcctcatgggcaagcagaagtgattctggtaagaaatgtacccaagcagtgcaaagaacacaagaaaagaaacgacagtgtagcatcagtgatgatggccagtcccagaggattcaacagcaaatttccaactgcagatactctgttccctgtgacacatggggtctaactagagcaaatgcctacaagatttaagatgacatgcatggacattagctttaaagcggtgcttgagtcattgtcctcaggtatcttggtgtgtagatggtcagagatgattgacaggaaataagtaatgaaacttgcatgctttcagtgctaatattttagcacagctaactaatggaaactgaattccaagatggaaaaaaaatcacaattttcaaagtagtaaatacaaattcctttgcaatagaattttatatcttttacagcttatctatactgtgttttaattttattttgtgttgatggtaacttcaataattgcctgcaattggccaatcaacacagggcaagccctccaagcctggaggcacaacaatcctgagcctgtgcatacccccagacactccccttacgctgccctacaagatctctatgcagccagctcgaactgtctttgttacccatccaccatggcgggtgggtcaaagacccgagctaacatggggttgttctgtagttgcctgtatatttacctttggatttccatatgattgaattgggatctttggtagactgttatttcaacctgaagacatgacttcggtgcgttcacaaggcaggtgtagttagtttgatttgcctggcaaagtctgtatttctcacttattcctgaaggacagctttattcagtacagcattactgcttggtagcaagttttcttccagcagtgtgaacatatcagtgtagtccctttgggctgcacagtgttttctgagaaaccttgtcctagtttcgtagacatttggctgggtgggaaacgctactttcctcctcattctttcagagcacttccttcagttttgacttttgacagttggagtataatttacttcagtgtggatgtttggggttcatgttcaggctttgttggacctcctgtgtctctgatgggaaggtttagggtctgttgggactgctgcatctgagatgggagggttatctcctagatatttgaagctttcttgtcgtgacctggaatgtctcagctccaagccactacagccaggaagttctaccttgagtgggggtgcatggacatggaaactcctagcaacccagggcgataaagaccaaacacaggcatcttgtcatctttaaagatctcttagttccatgttgtaaaacttgagtcttttctttgttttccatctttacgactgtttcttaaccatcctgctatagcttcgagaccatttctttcctttcttctcctctctgctagctggctcctaaccttctgtcatcctcacttgttactcacccatacctccacctccgcccaggtgctggcctatttagatgcgtaggcccatacagatgcaaactaggaggcatattaccctgaggccatggtaaacaatagtagccttactggcattaacaatacaatagtgagctttcctgtgctcctgtttattgaagctggaggctgggcctcaaagtatttcataatggaactattttggtcccccacactttcttactaagcatcccacctgtttacctgtccttgtttaaggagactgctggaatactgtaaggattaaatgatgtcttacaaggccacactttcttgaattttttactcctttttatttttgtttttctgatggagtccttccaaatgactcatcttcatgtccattgatccttccattctgatctgccgtccaacacttatcatggatttttcagtttagtgtctgtagttttcagctctgacactcttactgaagggaccagctccccatttcggcagccacaacagccaaacacccacttgcctgaccttgtcttggtcactaagaggtcagacacctgccttgtggcaaggaaccaattagaagttagctggtggtgctatgttttacggctctgggtgtgctttacggacaagcacacagctatgatgcgcagagcataacaaccaccctgggagggcctatgggccataacaaccagttgaccaatcaacacagggcaaacccgccaagcctggaggcacaccaatcctgagcctgtgcgtacccctagacactctccttacgctgccctataagatctctatgcagacgctttgagctgtctttcctagccatccgccatggtggatggatggaaggcccgagctaacatggagttagctcgttaaacaactataataaaaccttgtgcagtttgcatcaagctttcgaatctgcttggtaattggggtgacagaggtcctgggctgagatcctagaggcctgagcttctgggggtcttacattacatgactcccagccagcatggctcatcaccagggaagggggaatcaggaccatagtaggagtcatcctttgctgggtcggggattagctgcttctgggtcactgtaaagagacaactataggaggaaaagtgaattttggctcacagtttctgagacatcctgtcatgctgggtgggatatggtggtgttcacagtggcaagagtatggagtagcaacttgtttccatcaaggctgagaaaaggaaaatagaaagattaggccagaataggaaacagctataactcccaaaggttcaaacataatgattattgagagctagaagcctcctaatggcccctcagccttaaaaataacatcacaagctggggaccgagtgttattgttttgtttaaaaagaagaaaagagaaatgttgagacatgagactataagtttattataaggcccggcagaatggggagactaagaagaagaacagggtaaatggctgaccgccatggttggtcgccatagagagacagagcggggaaacagagaggatgggtagtcagccaacccaagaggagccaaaaggaagagagtgagggatgggtggcaggaccttttaaaggaaaggttgcatatgcgcactggggttttgcacctcacaggttgtaatgcatggcgggtgagtgccccattgttagggggcggggtcagggtcatccacgtgtattgttcttacaccgagtgttcaaaacatcattttgggacaggaatgtatttcaactggagaagtgcttgcataacatgcaccaaacctgggtttgtattctcagtacctcataaactgggtgtgctggtgcacacctgtagtgtctgaactcaacaggtggattgagggcagcctgagatacctaggaccttgtttcaaatagtatagtaattaattaaacaatgactcctatgggagatatttcagacttaattcataccaaataggtatgaaaaggggggggggagagaaaaacacagaaaaggaagagaggaagaagagaaggaaggatggagggagggaggaatggagggagagatgtaggaagggacagagaaagggaaggagacctgggatgtggagaatttggagccttgtacactgtggtgaggatggaacttgatgtgttattaaggcaaataatgtacattattggggacaaatacaaatgggactccacacaatccagcaattctacttctggggattcgtccagaatccagatcttgaggagaggattgctctcacgtgttcacagcagtagcctagatgtagaaacatcccaggtgccctcctacggctgaggaggtatacttgaaatgtagtgatcacataatggaaaattttcagtccttgaagagaaggaaacctcatatgtggggacattagccactgagcaggagaggctacacaatagactgtgttgcagtagctcaagcaggcagtcacagaagcacgaggtaaactggtgattccaatggttatgcaattccattgcatcctagttgtggatgaatgccccggccctcggggctccggtaattcatgagtccgaggtggatcacgcctgcaaataatgggcgggaaagaaagagcgggaccaagcagattccattgtcaatgcccactttattgaaaccaaggagctttttaaagagaagggaggagcagagaaaaaggaggtggggggagggatgagttaattattctcaggcaggtattctgaatctcctgtgtttatctcaggcactaactgaaaggttcaggcattatgctggcctgcccctgttacctggtggaatccactcaggcaataccctggtcagcccaaggttccatgggaaagaagtctgcacacaggtgcagaggacccctttaaaagataggcccctgcccctttacnnnnnnnnnnnnnnnnnnnnnnnnnnnnnnnnnnnnnnnnnnnnnnnnnnnnnnnnnnnnnnnnnnnnnnnnnnnnnnnnnnnnnnnnnnnnnnnnnnnnnnnnnnnnnnnnnnnnnnnnnnnnnnnnnnnnnnnnnnnnnnnnnnnnnnnnnnnnnnnnnnnnnnnnnnnnnnnnnnnnnnnnnnnnnnnnnnnnnnnnnnnnnnnnnnnnnnnnnnnnnnnnnnnnnnnnnnnnnnnnnnnnnnnnnnnnnnnnnnnnnnnnnnnnnnnnnnnnnnnnnnnnnnnnnnnnnnnnnnnnnnnnnnnnnnnnnnnnnnnnnnnnnnnnnnnnnnnnnnnnnnnnnnnnnnnnnnnnnnnnnnnnnnnnnnnnnnnnnnnnnnnnnnnnnnnnnnnnnnnnnnnnnnnnnnnnnnnnnnnnnnnnnnnnnnnnnnnnnnnnnnnnnnnnnnnnnnnnnnnnnnnnnnnnnnnnnnnnnnnnnnnnnnnnnnnnnnnnnnnnnnnnnnnnnnnnnnnnnnnnnnnnnnnnnnnnnnnnnnnnnnnnnnnnnnnnnnnnnnnnnnnnnnnnnnnnnnnnnnnnnnnnnnnnnnnnnnnnnnnnnnnnnnnnnnnnnnnnnnnnnnnnnnnnnnnnnnnnnnnnnnnnnnnnnnnnnnnnnnnnnnnnnnnnnnnnnnnnnnnnnnnnnnnnnnnnnnnnnnnnnnnnnnnnnnnnnnnnnnnnnnnnnnnnnnnnnnnnnnnnnnnnnnnnnnnnnnnnnnnnnnnnnnnnnnnnnnnnnnnnnnnnnnnnnnnnnnnnnnnnnnnnnnnnnnnnnnnnnnnnnnnnnnnnnnnnnnnnnnnnnnnnnnnnnnnnnnnnnnnnnnnnnnnnnnnnnnnnnnnnnnnnnnnnnnnnnnnnnnnnnnnnnnnnnnnnnnnnnnnnnnnnnnnnnnnnnnnnnnnnnnnnnnnnnnnnnnnnnnnnnnnnnnnnnnnnnnnnnnnnnnnnnnnnnnnnnnnnnnnnnnnnnnnnnnnnnnnnnnnnnnnnnnnnnnnnnnnnnnnnnnnnnnnnnnnnnnnnnnnnnnnnnnnnnnnnnnnnnnnnnnnnnnnnnnnnnnnnnnnnnnnnnnnnnnnnnnnnnnnnnnnnnnnnnnnnnnnnnnnnnnnnnnnnnnnnnnnnnnnnnnnnnnnnnnnnnnnnnnnnnnnnnnnnnnnnnnnnnnnnnnnnnnnnnnnnnnnnnnnnnnnnnnnnnnnnnnnnnnnnnnnnnnnnnnnnnnnnnnnnnnnnnnnnnnnnnnnnnnnnnnnnnnnnnnnnnnnnnnnnnnnnnnnnnnnnnnnnnnnnnnnnnnnnnnnnnnnnnnnnnnnnnnnnnnnnnnnnnnnnnnnnnnnnnnnnnnnnnnnnnnnnnnnnnnnnnnnnnnnnnnnnnnnnnnnnnnnnnnnnnnnnnnnnnnnnnnnnnnnnnnnnnnnnnnnnnnnnnnnnnnnnnnnnnnnnnnnnnnnnnnnnnnnnnnnnnnnnnnnnnnnnnnnnnnnnnnnnnnnnnnnnnnnnnnnnnnnnnnnnnnnnnnnnnnnnnnnnnnnnnnnnnnnnnnnnnnnnnnnnnnnnnnnnnnnnnnnnnnnnnnnnnnnnnnnnnnnnnnnnnnnnnnnnnnnnnnnnnnnnnnnnnnnnnnnnnnnnnnnnnnnnnnnnnnnnnnnnnnnnnnnnnnnnnnnnnnnnnnnnnnnnnnnnnnnnnnnnnnnnnnnnnnnnnnnnnnnnnnnnnnnnnnnnnnnnnnnnnnnnnnnnnnnnnnnnnnnnnnnnnnnnnnnnnnnnnnnnnnnnnnnnnnnnnnnnnnnnnnnnnnnnnnnnnnnnnnnnnnnnnnnnnnnnnnnnnnnnnnnnnnnnnnnnnnnnnnnnnnnnnnnnnnnnnnnnnnnnnnnnnnnnnnnnnnnnnnnnnnnnnnnnnnnnnnnnnnnnnnnnnnnnnnnnnnnnncaatatatatatatatatatatatatatatatatattattttccctataatggaataatacccttactagatagcatcaggctaacaattaaacagctcaaggaaagttttgggttatctcctttggaattgttggccaatgaggttccatttctggttattgtcaatgatgcttgattactctccagattaggtcgtgatatcctaacactgaagatatcatacactctagtcataggatgtgtaaaaatcaagttggttctcatctcgaagctttatccctactggatagatttccaggtgctggaatgctctctgaatgctaccacagaagaaaagtgatcataaaccaatcttatccacctgttacaaagattacaggcctggaaagacatgtccactggtgcaataatagcacaaatatcatgaaagtaaccaatcacttttaggtttgatttaaaacccatttcacaaaacatctgttctacaagatgaaacccactactggcaccattattgaaaggttcaggcattatgctggcctgcccctgttacctgggggaatccactcaggcaataccctggtcagcccaaggttccatgggaaagaagtctgcacgcaggtgcagaggacccctttaaaagataggcccctgccctctctctctctctctccccctgttcctgctctctgtcccctctctctgtttccccgctctgtctctctatggcgaccggccatggcggtcagccattaccctgttactcttcttagtctacccattctgccagtccttataataaacttatagtcaatatgtctgtctcaatatttctcttttcttctttttaaacaaaagaataacactaactaaggaaatgggggaggggataggtgttagttgcttctcacgcagatatccagaatctcctgtgatatgccagactttctggtatctaactaggcatggggtcgccaaggctggcttctgacagatgaacactgtgtcttctattaacgatgctgctcactgcaaatgggcaaactactaagcacacaaacctcactatgaagtgttattacaattttaataaaaaaaatctgtgccaacatttcatttacgtgatgaagggacttctggaacaatgtagctagttcagtgaggagtcgagaaatagggtttccattgtgacagtaagagtgccgaataagattaccaagctgcatgcaaatatctggaaggtttccaattgtttgtcaaaattgtatttccaaagggactcatggctctctgatatacattctagaaaacggtctactatgacaataaaaagtcagattgttagacccccgaaaactcaagtatccggggtcccaggccacgttcgaggtcaccccaatcaccaggcagattcgagagcttgctgtaaactgcacgaggctttattgtaatttaacgagctaaccccatgttggctcgggtctttcacccacccgccatggcggacagctagaaaagaccgtttgaagctactgcgcatagatctttatagggcagcataaggggagtgtctaagggtacgcacaggcttacgcacaggctcaggattggtgtgcctccaggcttggagggcttgccctgtgttgattggtcaactggttgttatggcccataggccctcccagggtggttgctatgctctctacgtcattgctgtgtgcttgtccgtaaagcacacccagggtcgtaaagcatagcgccaccagctaacttccgattggttccttgtcacgagacaggcatctgacctctaagtgactaaggtaggtttatggcaagcacgtgttcggctgttatggctgccaaaagggaagccggttccttcaagataagttatttttgtcccatttcaagttctagataatttaaatttttctttattgaaaatagattcttttcccatacaacatatacttattattgtttccccttcctttactcttcctagctcctccccacctcctctcccctccaaatccactccctttctgtctttcagtcttccaagagagaacaaccaaaggtgacaaaagttaatataataagatgaagcaaaaactatcatattgaagttggcacagcaacccaacaggagaaaaggagtcccaagagcaggcataagagtcagatacccactcactcttgaagtcaggagtcccataaaaacaccaagctaatagctataataagtacacagaggatttggtgcagactcatgcaggctccatgctttcttcttcagtcactgtgaactcatatgctccttgcttaggtgattcagagggtctttttctcctggtgtcctccagtccctttgactcttacaatcgttttgcatcctcagagctcagagaggaaggatttgatggagacctccaatttaggttctctttccacataacatctagctgtgcgtatctgctgcccgaggaagtctgtctaatgatgactgggtaaggcaataatccatgagtatagaaggatatcattaggaatcattttattgatttttttaagaccaactgtgtttggttttacccgaggtctctgggctatttagtctctggttcttggttacccaagcagtgttgggtatgaattccttctcatggagtgggccttaggtcaaattatacaagttctgtgtcaccattgctctagcatattttgtaggcaggacagattgtaggttaaaggtttttgtaactgggtaggtatccacatttctcttttggtaacctgaaaagtatcttcctgcaccaaagagactagatggtaggcgtgaatgttccatgcaggcaccagctccacttctctatgctcaatgagtcgtgtgggtgttgtccttggcaatggagccacattgccagtttgcagagaacaaccttttgttttagcaaacagtctggcttgtttggggatttccatgagatacccttggtcaacaactcaactgaatgtaaactagccctgccactggaagtctcgcctggttacaagagatggccagttgagactccatataccccattactaggattcctcattaggatcaccttcatagattccaggaagtttctactgcagtaggtttccacaaaatctcccaattccagccatctctccctacattccccccctccatcctatatcctcccaccacttgattcccccactctcacccccagtccacccataaaaaactatcctatttccacctcccagggagactcctgcttctccccagagccctcctatttacataatatgccttcctacataccatagcttggttatcattaacttaatggctaatatttccttataagtgaatgcataccatatttatctttctgggtatgggttacttcacttcggatgattttttttctagttccatcatcttttcttactccatctagtgcctgtaaatttcatgatgtcatttttttgacagctgagtaatactccactgtgcaagtgtaccgattttctttatccattattctgttgagagccatctaggttgttttcaatttctgactatcatgaacaaagccacaatgaacattgttgaacaacgaacattctttgggtatgttcccaaagagtggtatagctaggtcttgaggtagatcgattcccaattttttgaggaattgtcatattgacttccatagtggctgtacaagtttgcactcccactagcaatggaagacctttccccttactccatatcctcatcagcataaactgtcatgtctgtgtgtgtgtgtgtgtgtgtgtgtgtgtgtgtgtgtgtgtgtgtgtgtttaccttagccaatctgacaggtataagatggaatctcagagtattttgatttgcatttccctggtggctaacaatgttgaacatttccttaagagtttctcaaccatttgagatttctctactgagaattctctgtttagatctgttcctcatttttaatattgaattctttgggtatttgatatctgctttcttgagttctttatgtactttggatattagtcttctattgaatatagagctggtgaaaatctttttccatctgtaggctgcttctctgtccaattgacaatgttttttgccttacagaagctttcagtttcacaagctctcatttattaattgttgatcttagggccttgctattggcatttcatccagaaagtagtttcctataccactttctcatctatcaggttccatgtatctgtttttcttttttgcagattttttttatttgaattagaaacaagattgtttcacatgacaatcccagttccattgtccctcctgtcctcccctactagcccccaactaaaaccctacctatcacatatcctttctgcttccctggatggtgaggccttccatagggtgtcatcagagtctatcatatcctttgggataggacctaggcccacccccatgtgtcttggcccagggagtattcctctgtgtagaatgggctcccaaagtccacacttgtgctagggataagtactgaaaaactacaggagatcccgtagatttccgaggtttcctcactgaagcccatgttcctggggtctggatcagtccaatgctggtatcccagctatcagtatggggagcaagagttccaggatgttcaggtcagctgtttctgagggtttcaccagcctggtctggacccctttgctcttcactcattcttctttgcatctggattccagttcagttcagcaatttagttgtgggtgtcagcttctacttccaccagctgctggatgagggctatcgggtggcatataagtcagtcatcaatctcattatccggggagggaatttaaggtagcctctcctctattgcttagattgttagctggtgtcatctttgtagatctccagacatttccctagtgcctgatttctctgtaaacctaaagtgtctccctctattatggtatctccattcttgttatcttctattcttcccctgactcaacctttctgctacctcatatcctccgcatcccaacctctactctccttcgcattctcctagctccctccccccacttcccatgctcccaatttgctcaggggatcttgaccctttccccttctccaggggacgatgtatatctgtcttagggtcctccttatttactaacttctctggcagtgtggattgtaggctggtaatcctttactctatgtctaaaatccacatatgagtgagtacatatcatgtttgtctttttgtgattgggttacctggctcagaatggtttcatcgagttccatccattttcttacaaatttcaagaatccattgtttttttctgctgagtagtcctccattgtgtaaatgtaccacattttctccatccattcttcagttgaggggcatctaggctgtttccagtttctggctattacaaataatgctgctatgaacatggttgaacagatgtccttgttatatctgagttctttgtacatttgggagaccatccctctgtcagatgtggggttggtgaatatcttttcccagtctgtggactgtcgttttgtcttgctgactatgtcctttgccttacagaagcttctcagtttcagaaggtcccatttattaattgttgatctcagtgtctgtgctactggtgttatgttcaggaagcagtctcctgtaccaattaattcaagggtatttcccactttatcttctagtaggttcagtgtggctgggtttatgttgaggtctttgatccattttgatttcagttttgtgcagagcgaaaggcttgggtcgatctgtagtcttctacatgtctgcatccagttatgccagcaccatttgttgaagattttctctttgttccagtgtatacatttggattgtttgtcaaaaatcaggttttcgtaggtgtgtgggtcaatttcagggtttcaattctattccattggtctacctgtctatttttgtgccaataccaagctgttttcaggactgtaatagagcttagagttagggatggtgatgcctccagaagttactttattgtacagggttattttggctatcctgggtcttttgtttctccatataaagctagaacttcaaggacaatattgaagaggtatggaagagtggacagccttgtcttgtacctgattttagaggaattgcattgagtttctctccatttaatttgatgttggctgttggcttgctgtatattgcttttattatgttgaggtatgttcctgttatccctgatttcttcagaaccttaatcatgaagggatgttggattttgtcaaaggctttttttgccatctagtgaatgatcatgtgatttttttcctcagtctgtttatatggtggattacattgatggaaatctgtgtcttttttataggcgagttaagaccattaatgttgagggatattaatggccattgattgttcattcttgtttggttttgatttggtgatggtggcgaaattacgtgagggattctatccccttttccttttggctgttgctaaagtgggattatctattgcctatatttttctggttgtagttaacttccttaggttgcagttttccttccatgttgcagttttccttcaagaactttctgtagggctggatttgtggatatgtattgtttgaatctggttttgtcatggaatatcttgttttctccatctataatgattgaaagctttgctgggtatagtagtttgggctggcatccatggtctcatagtgtaggtagaatatctatccagaaccttctgtctttcagaatttccatggaaaagtcaggtgtaattctgatagggttgcctttatatgttacttgatctttttcctttgctgctcttaatattttctctttattctgtatgtttggtgttttaattattttgctccatgtgttcctggcgattacctttgagatgctggagtcagaaaggtcaggagtacgtgggtgtaactttgtatataactgaaacatgcaagttctaacagggggtgtgaaacaaagttgacaatttgtggtgatcacttccagatgggaatttttcctctgtggttgaacattaattgaactgggaggcttctcctcttctctctggggaaaactaagttctgggcccagcaccccaaatgtctgccatccatgtgtgtatatgtgtgtgcacatgtatgtgtgcgtgtgaccctttatgtgcacacgtgcagactagtggctaaagctgacagccttcctctattgctcttgacttggaatagcatcactcattgaagctagagtggctgagttagattggtcagctggtgagtccctgggatgcatgcatctggattttatataggtgctgaggactctggcctcatgctcaaatagcagacaccctggaccacctcactcgtcctttgagaactctaagggattttctcatatcctctttgagaccctctatcgttttcatgaagatgcttttaaggtcattctcttctgattcatctgcattgtgatgttcaggtcttggttgtgtatggtccctagtctctggtggtgtcatattgtattttctgttgttgaatgtgcttttacattgtcctcttctcatcctttcttctggtgggtgtagcaggagtctcttcctctcctggtgggtaggggaccaaggttcccttctggtagatgcacagttccaagactctgatgtctgtcctcttcttagggatgaaggtggcactgttaccggggccctggcagtttatggctgttttggatccgccaccaaattcggatctgatgagcagaccccaggcatcaggtgtccctcgagcaggcccaaagaactgtaactggaaacagcccctggcctaccttggccggagaatggaggtggaactgctacctcatgtatctggttttatgttgtgttttttatccacttggacttgagttttgtgcagggtaatatatatggatatatgtgtatttttctatatgcagacatccagtttgaccagcaccatttgttgaaggtgattctgttttccagtgtatattcctgtcttctttgtcaaaatcaggtgttcataggtatgtggacttacatctgggtcttcaatttgatttcattggccaatatgtctgtttttgccaatacaatgtggtttattattattactacagctctgtagtacagcttaaaatcagggttggtgagacttgcagaaattcttttattgtacagaattgttttagctatcatggatttttgtttttccatatgaagttgagattgtcatttcaaggtttgtaacaaactgtgttgggattttgatggggattgcattgaatctgtagattgcttttgctatgactgccatttttactctgtcattcctactgatccacgagcatgggacatcttttcatcttctgatatattcttcaactttttcttcaaagacttaaagcttttatcatacaagtctttcccttaaatggttaaagttatgcccaagatattttatattgggatattgtgaagggtgttgtttccaatttctttctcagtccatttgtcatttgtacatggaatttttttgagttagtcttgtatccagccacttcactggaggtgtttatcatctgtagggattccctggtggaatttttatggtcacttctatatacttttatatcatctgcaaataatgatactttgacttcttcctttccaatttgtatcaccttgatttccttttgttatcttattgctctagctagaactttgagtcctatattgaatagagatggagagactcgacagccttgtctcattcctgattttagtggaattgcttttgtgtttttcaccatttaatttgattttggctataaactttctgtaaattgctttagttatgttgagatatatcctttgcatccttaatctctccaggacttttgtgtaatgcctgtactatgactaagtctaatggaatctccacttgtggcatccttgccacaactaagtggagtattgggtaaaagcctggagatttacttaaaaaccgggccgtctggtagcttgtgctaagagaatgtgtgtgggtctgtgtttttttgcagggagggagcagccttgtatatagactcacagcacagtgggaaaacccaggtgtaaaagctcgtgtttttgatgccagcagggcaaggccggggctgtaatccaggactagaaaacagaatgcatctgtgtttatcaattcacggagactctgtgggggctggagcccaacatctctcccaacacttttgtcataaagggctattggaatttgtcacaggcattttctgcatctaatgagatcatcttttattttttttctttcagattgtttatatggtggatcacatttactgatttttgtatattgaaccatccctgaatttctgggatgaagcctacttgatcatggtggatgaacttgttgatgtgttcttggactcagtttgctagtgttttattaagtatttttgtatctatgttcaggagagaaattgatctaattctctttctttgttgagtctttatgtggtttgggtatcagagtaactgtggtctcataaaatgaattggacagtgtccctcctgtttctatcttgtgggataatttgaggaatattggcattaactcttctttgaaaatctggtagagttctatgctaaaaccatctggacctgggctttttgttttgttttgctttgttttatgaagtgggggggggggattttaatgactgcttcttatttcagtgggacttataggtctatttaaattgttatctatattgatttaactttagtaagtagtacctatcaagaatattatccatttcttttagattttccaattttgtagagtatagtttttaaagtatgacctagtgattctttgaattttctcagtgtctactgttatgttccctttttgtttctgattttgttaatttgggtattctttctctgcctcttagtaagtttggatagtggtttgtctatcttttttattttctctaagaaccaactctttgtttcattgatttttttgttttgttctctttgtttctattatattgatttcaactatgtttgattaattcttgctgtctactcctcttgggtgtgcttgcttctttttgttctagagcttttgggtgtgctagtattaaatctctccaattttcttttataggcacttaatgctatgaacttgcctctcagcagttcttttgttgtgtctcataaggttggatatgctctgccttcatttcctctgatttctaggaactctttaaattctttatttctgtcttgacccatttttcattcagtagagagttgtttggtttccatgaatttgtgaactttctgttgtttctgttttggatgtctagctttaacacatggtggtctgatgggatatagggagttatttcaatattattgtatctgttgaaattgaaacttgctttgtgttcaagtatgtgattgattttggagaaagttccatgaggtgcagagtagaatgtatgttatttgtgtttgggtgaaaatgttctgtaaatatctatttggtttataacatctgttagctccagtatttccctgtttagtttttgtcttggtaacctgtacattgatgagggtgggggtgggggagtagggggggcggtattaaagtttcgaactatcagtgtgtgagggtcaatatattatttaaactggagtagtgtttcttttccaaaatgggtgcctttgtgcttaggtcatagatgttaagaattgcaatgtcttcttggtggatttttcttttgataagtatgttgtgtcattcctatctcttttgattggttttggtttgaattctattttgtccatttttatggaatatctttttccattccttgacattgaggtaatgtctatccctgatgttaaggtgtatttcttggatgccgcagaaagaaggatcctgttttcacatccattctgctagtctatttctttttattgaaggaattgagaccattgatattgagagatattaatgaccagtggatgttgattcctgttatcttgttgctgttggtggtggtttgtgtttcccttctcttatttgcttgtgtgagattattcctgtgttttcatgtatgtaaaatctcttttgtatttttcctttcagcactttctgtatggctagatttaaagatatatattgtttaaatttgactttatcatggaatatattttctccatctatcatgattgaaacttttactgggttagtagtctgggctggcatctgtgatctctttaagtctggacacatctgtccaggcccttctggcttttagagtctccattgagaagtcaggtgtaattctaataggtctgactttatatgttacttggtgtttttccattgcagctttaatattctttctttgtttagtattttgattattatgtggcgaggggattttcttgtccaatctatttggtattctgtatgatccttatacctttatagacataaatatctccttcatcaggttagggaaattttcttctatgattttggtgaaaacattttctgtgtctttgagctgttatttttctccttcctctttacctgttattcttaagtttggtcttttcatagtgtccctgatttcctggatgtttgtgtcaggagttttttagattaatttttttccagatatatccatttcttctattgtgtcttcaacatctgagattttttctcttccatctcttgtattctgttggtgaagcttgcttcttgtcatttgtgtttgaattcctaaactttttctttctatatttccctcagtgtgggctgtctttattgattctattttaaatttcaggtcttaaacaggtatttttatttccttacactccttttttgtatttttctggatttaaaggttttactaattttctctttaggtacctctattatattcataaagggtgttttaaggtctttttcttgtgcttcagcaggggtgcacaggaggtgtggtcagtggggagggaaagccacagctggggttccattgcagcaacagggacaagactgtgggattgggtctggggctcagagacaggagaaggtcagtgacctgattttctgcaggtgtggcctatctggataaatttttgctgattactacttttgctgccataaattaacaatgttatttttcatagtgaatgtgtttgtgtcttcagacccacaagaaagccaatgttgcatgttttctgctaactgaatttgtttaattaacttccttattcagattttcaagtttgaattagacataggctaattagacattagtgtatatacaaaccatggcatcaacactaatggtgtcctaatttatattatggcaccaattcaatggcagttattaagcatagcccatgacctgtgtcttcatgttctatggacgttgttctattagtctgatttatttacataagtgcaacaataggtgttgaaacagcaacacttttgttatattgtcagtaaaactaaagagaaagtggcgtacttaatttctaactggaggccataaaacgaatctgagagtctgggctgtggttccaatgacctttattatatgagatattatctttatatcttgtattaatacaactattcccagatgaaggaaataaaacttgcactaagtttgagtttcagtccctgtaacagaaagaattctgatttctgggggtctaccagttgatgaggttccttgcctgccaagaagtgaccttttatacatcagcaactagccaagtgttcctgagatggctttacaggtgtgttgattccacatagaaagtacaactctgcttctaggtggtgggccccatcatatttctgaagaaatagaatttattctccagacaccattaccatcacagcttcagttgcatagtcagttgacctgtctatttagagcctgacataaaggctgatttctaaaagtactgtgtaaatgctgccagaggctggggggacagctcacttagcagagtgcttgccttgtgagcataaagaatgaagttctatctccagaatccttgtggaaaatactgagtgtggaggtgtgtgcttttaatccctacctctactgggaggtagagacaggcaggcttcttgggctcaatgggcaactagtctatcctacttagtgagctccaggccagtgaaatcaagtcactcttgttatgtttaaaagtcattctttgaatgatctttgttcatcttttacttttaactgatttacatcattatgtagaaaattatttttcatgtaaagtgtattaattgggtgttggatttttaaagtcctgtctgaatttcttttatttggggtatggagaatatttgcatttaatgtaattattgacaggtttgtttggttttgaattagttaaccttgcttctagcgattccagttttctgttttgttggctaattagccaataaatgattgctttaggattcggtgactgctttagggttcagtgactgctttagagttcagtgactgctttagggttcagtgactgttttagggttcaatgattgcctaagagttcaatgactgctttaaggttttgtgatttctttagggtttagtgactgctttagatttttataggatgtatgtttttaattgacaatataccactagccagtgtcactgcagttacttcatgaatgtttaagaaccttctgaaagcatttttccctttctgctttctcagcctttatgttgcataggcaaatatttattctcagtagttatgggtgctgtgcatgttcaagagcaagatgatggcagacctaagtctggtagatgacaactccctggtcatatccccacaggttttccttcatgaccttgacgctcaatctgtactttgaccttggccttccagccttgtttgagaaagcctgatcttcaggcaatttctaagttaattccatccaaacactgtggctattactactgaaaacggttataattttaattaagacttgctgagaacttactagcatttattgctttgcaatagtggtttgtagtcattaagtcacttatctgtcttgtatcttcaaaggacagagaccggggagagaactaagttctcttttgtctctttttgcaagtacactaaagccaccactagggctccatcctcatgacataataagctctcagaggctccatgtctgaatagcagctcattggcatctccaatatggattttgaggggcacaaacatgtagtgatgatatgttattaatgtcaaaatgtgttaccattttgtttagttatctctaaagagatttgcatagacaaacagcacttattacccatgtgatgcccatttcagcttctcttcatccctttatataaacctaggtttctatctggtatcacatcctgcttgaaagattttctttaacaaatttgttaaagcaaatatggggtggggtgacaggttcagcttctgtgtctgtaaacacctttactttgagtggtgttttactgggtataagttaaagctggttgtttcatttcttttggaacttccaaggcctcaaacatcgaatctactgtcattcttgtgtttaggttcttgtgtacacagcatgtcccttgtttagctgtttttaggttttgtgcccatccttgattttcagctgttgctgatgatgtgatgattttattttcttcaagtttcttgtgcaaggcatttactgagtttcttatgtttgagttatcattatattttgaatggttcttgttattgttccatgaattacataagttaggccatttgaagctcaccaacatctcttgggtgcttatttcattttttatctgaagctcattttgtatgatatttaatggtctgtattgaagttcaccattcttgtaatccagtctgccatggttccagtcagtacagcattcttctctatgttggaacttttcaatagctttgcctctatttgaatgcccaaccatctagagaataattattagattcatttaaatgtccttctctggatcattttggattgattctgactgattttgctccccccatgggctatattctttgactcaattccagacattatgatagtattgtaaagtattcactttgaaccatggccacataattttagtttatctctacctctgcctcccagaattggaaccacaggcatacaccatatacccaacataaagccagtctaaaacttaaaccagcacattggggtgaagctcagtaacaaattggatgcttactatccatggggctcagtattgaaacctgagtgccaatcaaacaaaacaaagcaaataacaataaaacactgtgcatatgacaataagcacacacacccattcaacttcttcaaattcaagtataatacatttcttacatcaactaatcaacatatcaatttgttgtaggagttacattaaattattgtccttttacctccagtttttacacatgttgtccccaacacttgaagtggcaactcccaatctatttagttaatttcctatgctttatctgttaattcaaatatcacttcctcagcactctctcttgattcctagaatgagttctgatcactcctctttggttctcagagttccttttttcctatgcaactcaatttcttagagtataatgtgaggttctttttctcttgtcccatctgatctcacagcccctgaaccccaaataaacacacagatgctatattaattataaaactgttggccagtggcttgggcttcttattggctagctctgtcttaattgttaacccatttctattaatctaagtatttccacatggtcttatcttactggagaagggtccagacctctaactactttggtggctcacatggagactacctctgcttatgtttcccagaattctcctcatctcctagtcctgactatctccctgcctctattgaccacagtgttttattcatcaaccaataagagatacatatacacagaaggatattcccccatcattagagtttggtttttacactaaatcatgacctcaataagggaaggaacatcagtacacacacaaatatatacatatacacacgtatctacatttggatatacacatacatgcatgcacatacgtgtgtgtgtgtgtatgtatgtatgtatgtatgtatatatgtatgtatgtatgtatgtatatttaaagctatgtctgtcatagtgaggaacccatgaaagcagtaacttaaattcactttagatttatcaagctgactatatatcaaggaaatattctccaaatattacttcaaagaaccccagtgagaagtgaggatactaaaatgtatgatggaaagcacatgagctttgacaccagacatatgtgggtttaaattgctgtgtcatcacttattagctgagtgacctggaagagctgtttgctttctgagtctcaaagtgtcagtggtattgttagcacagagacagtaatagcttcttcctggagttgttatgacaagtgaatgaggtgaactatataacactcttaatataatgcttaaaatagagagggctgcagggatgctgcctgcctctgttcatccacttaccactccactctcaacgtccttggtcaccttctcctgagggaattattaatgctaataagtacagatataacacagaaaaaaacagttcctttctctagattgatggcaaaaatatggacaaacctatgtataacataaaaccatagaaaatgagaattagaggagactcaagagaaagacctcattgtggtgaagggattgaaattcagagaagttagctatctgggatcctggagtaagcaacaaggatctggaaggaagaacacccctaaatatcttaaggtgactgaggccatgcaatgacaaactcatgttgagacctgaaagatgacacacatgtgacagccactgacaaagaaggtgcaggatttaaagcccattctgctgacctctccatttctgaaccccatgagtggatgtgaacgtgtcaatgggggtactgttgtccagtggtattctttttgtggtttctgtttagagtagtctcttagttgttacactccactatatcgaactctgtggaataaaactcatatgaggggcaggtcaggggcatatcagcacccacaaaggtttggcccatattttgtactgttggggaaggtggctaggaagggaattgtgaactacatagtgtcaggtggcccttatatgaatcaaggcattggcatcttatgactgtgtgctgttcttttgagttgatctctgggacaagtgccagaaaaataaatgagaaccagactccaaattaaacattgccttatcattatgtcacagacaaaagcacgaagataaaaatctcaaagcaaaatagatggaggacaaaggggaaatagtggcagctgaaaccatagtttggagctaagaagtggaacaaatgaggttgaccatctgctcagaaggagagggagcctcagaaaaccactgggctgggacctggtgatgtgcctccatcagtcatggaggactgggaggagtagctgctctctgtatttcagtgtcctccattaaacgggaacgtcacactcttgccattttataagaccagtacaaattgttctctaacagctttccgtagttttttacctattgttagcatccaccttccaacttccatgatttactaagacccacaggaaggcactgcctttgtaccttagcagaaagtcacatggcaggaagaatgcacaattcttcccaagccaatttaccattctcttggcctcagtttactgaattggtggtgagaattaaaatgatattctgttcacagagtacttaatgcaatgtttaatacttagtattgttaaagtatgtatttctactttaattgaactttttatttattacctcgcatatgtattttagagttcatacagtggcatgcacgtaagggtcagaggacagctttgtggagttgggtctcttctaccttaatgtgggttctggggattgaactcgcatcaccagtcttgcacgcatgcacatttacctgttgagtaatcttgttagcccaaactatacattttaaacatttatacatatatacaaatccatgcagcatgtatgtcaaagactaatttagacgacaaatgaaggaagcaagaagatgataatggaggtactggaagaaggaagtctgtgtagttagaagaaaaaatgctgacttttaaaataactatgagatactttggttttcatcggcttgctatatttgattttggagaagcataccctaaagtccaaattctccttcattggtagtgactttgctgctagttaatgtctgcatggtttctacacagctttctttgtatgctgtatactttaccactgatggaaaatgaaataaataataagctgggtgcctgtcagtaagtcctgtgggactcaaggatgctggggtgaaattaagttgtgtacaaatctgtcagtgtctcaaggagtcaatacaatggtgtccccgaggttatctttttaattggacgtttattatatttatctctagggggctatggtagtctttcagcttatcactctccaaattaacacagtttttgtatagagcccaagacctaattaataataaaaatttaggaaaatgaaatcagtgatgggtgataaaggtttcaaagcaaagttgcccacgagtgctcaggcaaaagaaagtgcctgccccgatgtgccttccttcgggtttcagatgcggactttgctgtggaatttgatgagtctccagccagtcaacctggactattaaaaaacatttttcacccatttagcccttgtcaccaaataaccaccccccctccccagtatctctgggtttgaaacttgggaaagtgttggaaatgaggaagagcgagcctggaaaccaaacattaacatgtgtaattttcatattgtacatggggttttcccggggcattagaaaaggaactcacacagaagccatctgtatgaaaccatcagacaatgattatatcaaactaacatatccctcaggcctcacttccaaaaccttttctagtgtcttctcagatgaactgtttgttttatattttaactctctcatttccctttgttctttatctggagagctgttctctcccattgtgtgccccaagtcctgggtcttgatattttacaaatctcctcccattttacagcccttccactttaggagtggtgaaggcagaggagacctggttccctctcttctgtgactctttccttcaggtggtttttaaggtttcttcccaccagctgtttcttggcttgctgccttgctcctcttcattcctcactgccatccttttgtccctttcacagactcttggagcatgaaaaggagaattgaaactgaagataaaccaatgggcacttttaaaagagcatatggttattctttaatccataatgccttttcgtcacggttaatatcttaaatacaaaagtattggttttgacatctgtgaagattataatactaacatagattttaagaacagtttctataagatgtgtcattaatatatacatctgcgtatatttgcccgtctttgattcctcctaatgtaaacacttttccacaattgtattccttaagctgtggagtaagaagttgataaaagctggtacactaagcttgtgggatctgtggccatatgggaatggtaaccctgaacagtggaggcttgacctgggtagctccacacctgccttccacaagcagacaataggtaattggttgctaattcacctgaagcacaacagaagttagtaacaaagagcatcctagacaacaaacagcccccactctgtgaatgcaaagaggctcatagcacacagaggacctgagatatgaattcaaatccaccacagccgcttgggttctctccaggcttcagtttgttcttctataaaatgaacacattgatgaaggtgctggtcaccattctgagggccagtgaagaggaaagacactctgtgttacacccactctgtgacaaggtacagatgatcaagtgggctgtggtggcatctactgaaatcctagcactcaggacatggagacagaaggatgagaaattcaagaccagcttgggctacttacaagaccatgtttcagtaaaagaaaaccaaaagaatgaaaatacaggttagcatgaatattcaggaaatgaaataatatgaaattctagtttctctgttcatcaaagttggaaaagccgtgattctagtcatagctattattctgttaattttcttcatgggaccctggcatctttgctccagtgtgttatttgttgatttatcttatgctgtgattattacaaggaaataaatacatgattaaaagactggagataaatagcatttcttagtttttctatattggagggaggggcttagaggctgtctttggctggcatgggtggagccctcttctgaagcatcttcttcatagaaaacacctggctccaacagtagcttcaggatagccatcaagtcaacactttagttggaccttttagattgattcaggttatgggactgatgaggattgagggtacttgtaactcctcgtgtcacccttggttgacactcagaacatagctctccttgcaacagtcctgaagatggaaatgatcaacaggctctctccaagccacctcaaattactcttttggttttttttctttatagccatctgtttgcacctgtcttcttctatgccctcatcttgcaaatctgcaaatgattaactatgtcatcaaaaggacaactttcttctaaagatactgtctttcttaaggtttttatttctgtgaagagacaccatgaccactgaaactgttataaaggaaaatgtttaattggggatggcttatggtttcagtggtttagtccaccattatcatcacggtggggaacatacggacatacaggtagacatggtcctggagagggatctgagagttttaaatcttgatccacaggcaacagaaggagagaccactcctctgggcatatgtgagacctcaaagcatgcctccacaggtacaccctttctttaataaggctacaccaactccaacaaggctacacctcctaatagtgccactccctaggagccaagtattcaaacacatgggtctatgggggctatacctattcaaaccaccacagattccttctttgccagagatctaatgagatttttattctccattgcacaattggaattttatccccaggcaatgcagacaatacctgtgtgggcattccagtatctcctggttcagttctatacagtagctggtcctatgctggcacgatttagagaagaaaacatgatgaacagcaaggtaaatgattaaaaattatcatgtaagtgtgtgtgtacatgtgtgcaaatttgttccttttaccctgcatccccacatacatggatggtctatggcttttgttcagagcattagcattatcgtatgagttcctggtagtaacacaattactatacagttagtgacataacataacacaaaggcattgaaccagtagcagagtgtatgagttcctgtgcctgctgtaacacaattactaccaagctagtgactaacataacataaaggcattgttcttcaaaatggcaaagtccagaatgtatggcacagaactagaaccaacatttttttttcagggccattttctcactggagactttggggcaaatcctgctctttgccttttttgtctcagaagctgctcatgtttcctcagatcatgaacctcttcaccttcagatctagccatgtggagctgaagtctaaaggtgcatcttactgtctcatctctgatcctttttcctccttccacgactcttgtgatgactttggctttatttagagaatccagtaaattggctgtttttaaattcaactcataaacaatcttaatttagcatgcaacctatctttcttttttattattattgtaatgttacatagtaagacacagatactgcctttggggctggggaacattgtgccaatcacagaaaagcaaaacagtctaaaaatacaagtattagtgccattgtttccatactgtttaatattcatatgaattgatctctgaaagatgaggatcctgcagatgagagaggtgcatgaatactgctgttgtggaatatttaactatgtaaagatgtattacatttgattattctgtggactattattttaactgtgcaaaggtgtgttgtatttgtttctgctacatttgtttaatcatgaaaagatgtgttgctgtttcactttgcctgcctaaggcacctgactgttctaataaaaagctgaatagtcaatagcaaagcaggggataggtggagctaacaggaagagagaataaataagaggagaaatctaggcttaagaagaatgagaagagaaagaaaggaacacgcccagggccagccagcaggcacaaagtagggcatacagaaaaaaaggtaataagctccaaggcaaaatgtagatggagattaaaaaggttaataagtttaaaacaaaaaagctagccagaaatgagcataagctaggtccacatttcataaacaacaataaatctccatgtcatgatttgggaacttgttggtggcccagagggaaaagcctggcacatttggcattccaacatggggcccaaatttccacatagggactgagaaagcagaaaaaaacaaaacctaaaaacacacccaaaatggatatggctcctttaagaggctctgccatacaataagtcctatagcagctggtaagcttagtagaaacagcaagctaagtaaaaatgtctgcaacagcatgggcactggcatttcagagctggagtggttgcatgcatttgaatacagtcaaactcacctctgtacctggcctgagaacctaaggctcagctctcacagaccttaggagggatggagtcagccaccaaaaccacagtggagggcccaacagtagcttggcagtttaaggttttgctcatgtagatagaaaagtctagagatatgcaataaagcaggttcggatggggaaaaaacctctaagcagattactgtgtgtttaaaatgtgtgtaggcttaagaaagaaaagaaaatgtatatagacaatcatagaaaaagtaagtaatttgtaaataataataataataataataataataataatataagaataacccatggagaggtgggaaatacacaaggcatctggatcctgtatgttgtgttgactttgaattttttgaatgctgatgagtgaaaacagatgctgagagacatgagattgtaagaaggactaatgaaataaaccagcctagatactttaggaatgccttaattttaaaatgaaagtcagaaaatgtattgctttggggaagaggttatgcttttgtttccatggaaaatgaaaagctgtagatttgttcaaggttgatagagatcaggtttgattgaggaagaccccccctgaaaatcctagctacagacataaagaaataaacctagataaactacaggatagatgatgtatattttactgctcaaatacaaaacacacaaaaaaatcatatttgactggtttgtgtacaatgcacagttcatgcttgtgttaatgcagatatatattatacttttgaaagtgtgtatgttttcagagccagataaaaatgggtggcccaggttatccattctctcagaatgcctctgttgcagtttcctcagaattctacatccagaacagcttcaaggctactgcctgagatggtccagcctcacagactattccagccaggactgcagataagccttgtgctttctcattgcatagaaaccagataacaaatgatacagctagttttcttaggacttcaccattatctcaatttccttaggttccctaaagatgttattaaagatgctattatccagagacaactggaatcagtctagggaacacaacacccacattcacaagaggtgatgtgtggttttggccattcagtgggttatgaatgtttgtaattgtttgagggggatataggaatataggataaaaagacagctgttaacatcaaatattttacattggtatggattttcatgtattgatacaaatgtaaagttatttttgttatactgtatgcatgattttaatcttgtttaaaagaatttgtatactgacacaaatttaaaattatttttattacaacatactgtatatatctttatatacctttgaaagtcattgtacttatgcaattcacttaaaaatgcaatgtgaagttctagtccttgaaagctattattataaaccgtttaggataattaagaaacacaggctagaagttagtcatctataacaatccaacttgtagttatgttaggtatgttttcaagatcatacagagatttatcttacatagacaaacacttcaaagacctacagagtgtggcatttaaaatgttttgttaacatagagctttttatgacagtgagacttctgctcctggcagtatcaatatacttcataaaacgatgatggacatcaaagaaaatccatatggagattgctttaattgtgacaagctacccatttgtgaaagaaacttctctttccttgactgctgacatgctgtacaaatgggacaaacaggacataaaagaaaagactgttgaactttgtcgagacaaggtaggatagtctgcttcatagaaaaatctgccagacattctgaaggacacacaggaaagaggctgatgaactttgccaagactaggtaggacagtccttcaaaattcctgcttcatggaagagtctgccagatattttaggtctgtaggccaaagatggatgccccaacattgcacaggaaccttcagtgactgtccagacagtcagatgtctgtcgtttcatagatttgaaagtggcttgcaatgaacttcctgtttactcaggtaatattccatccttctggggtttgtgatggggttgaagactagctagttatagttacagttttccttagttatgacagaaggtaaatttggtagaaaactttgaactcaccaagataggataaaatatggagtattttttttgagtttgccaaatataaatgagctgatattgtgaatgtaattattccttgataattgtctttattgtgtatagtcttactacattaaagttaaaacttttcttttcattcagacaaaaaggaggaaatgttgtggaatatttaatgatttaaagatgttttacctttggttatgccgtggaatactactttagctgtataaaagaatgttatatttgtttatgctgcatttgtttaattatgaaaggatgtgttggtgtttcaccttgcttgcctaaggcactagattgttctaataaaaagctgaatgcccaaaagctaggcagaggagggatagatggggactgggtgtcagagaccaaaatagttccattatggaatgtcttaaggtccagcctccagtttcattaaacaggagcacccgggagctcccgcccactattgtattgctaatttaagcaagtctgctattgtatagcatagcctcaatatagaatgcctcctagtttgcatctctacaggactaagcatttgaataggcctgcacctgggctggaggctaggtatgtaagtaacatgtaaggacagagagttaggagccatggagtagagagaggtcagaagagaaatggtctcctcgtggccatggaagcatggttaagaaacagccaagaaaatgttaaataaacaagagatgctagttttacaacatggaatgatgacaagatgcctgtgttggtctttatcgatgttgggttgctaggagctttcaagttcacgctcccccactcaggccaaacctcatggcttccatggtttggagccgagaccggctgggccacgacaactcgggggtagagaaaataaataggaggagaaatctgggttcgaggaaaagggaggaagaagagagaatgaggagagagagagggaattccttgggccagtcatgaagtcaccagccaacagacacagggtagagcatacagaaacgatggtaaaaggccccgaggggaaagctagatgaagagaatcaggttaatgtaagttcaagaaaaaaaaaaaaaaaaaaaaaaaaaaactagtcagaaatgagtactagctgggccaagctatcaaaactaacaataaatctccatgtcatgatttaggagttggttggtggcccaaaagaaaacctggtatatactgccatggcaattccttctgattgtgagcctgaggtgactagcttgtggcaatcaatgagcagttatgtgcagtcctgacccagtgctgctccttagcatttgatgtgggagtccctaaagaccccctttcccgtcttatttctttccttactgggcttgccatgggtacaaggaatttttaacaattgttaattactgaaggtttggaaaatgtgtctcaactgactctttcaaagttgagttagaaaacttggtggcacataaatctgctaacataattaaaccctgggtatctgttaacataggggagaaattatgaaggaaccagcttcccttttggcagccataacggcctaacatgtgcttctatgaccttgttctagacactagaaagtcagatgcctgtcttgtgacaaggaaccaatcagaagttagctggtggcgctatgctttacgaccctgcgtgtgctttacggacaaatgcacagcaatgacgtagagagcatagcaaccaccctgggaaggcctgtgggccataacaaccagtcgaccaatcaacacagggcaagccctctaagcctggaggcacaccaatcgtgagcctgtgcgtacccctagacactccccttacactgccctataagatctttcgggagaccctaggagccgtcttttctggccatctgccatggcgggtgggtgaaagacccgatctaacatggggttagctcgttaaattacaataaagcctcgtgcagtttgcagcaagctctcgaatctgcctggtgattggggtgaccgagaacgtggcctgggaccccggatacttgagttttcgggggtctaacaattagattcctctgtggtaggatgcagtttagaacccgagacagtggagtggtgagggtatctggggtagaaggggattctgcataaggtatggctgtgcagtgatgaaatgtcctcagggagacctgcccagtaatgcacgaagaaaccccgtcttaattctacatagtaattatgaaacaccctggaggtctccctactttagtttacgggcatttcctggaatgccataaagatcaatgtatttattttctttcctttgagccaaggccctttctatcatcatgagagtattacttggaatcttgaacttggctatgggctctctgggtattctcacataatgtcttaagcagttccaaggggcacagggtcgtctacatgggcttctggctatcttggctggtttgatagtacagaatcaatgaagcctcccccaaacaacaacaaacaaacaaacaatcagaaacacagcacacctatgggatcctgtccttctacacccaagtacctctttttcctgttttatgtaacgatctcaggtacctcatgttccatctgggcatcatcacctcccgctttggatgcttctgtatttggaagggcaagctcttcatcggccacactgagcttaggggcagcagaagaaggacccctgccagtgatgcatacttaggctaatagcctgtgggcttctgagaagagaaagcacaggtagtggggagcagccctcaggagttggcaggaacaagcctctttttaaacaaaaccattaagaacatgaatccaacagaatctcagtggctctgaaaatatgatcatgtcctcactcacatctctctagtataaggaagtagaaaatgatgtttgggatcctgaggttctatgtccttgcactgtcactggggcaggaggatgcatcctggaactcctgccccatactctgggactgagacaatgaagcagtcagtatatcctcccacacagaggtatttaacagttttaatgtcagcaactgtgacttctttgggtcttctaatgatcatttgaaagctgaattaataataacaatgtgtttccttaatgaagaaatcaatcaattgctcaatcagtgaggcccatgaagtaggggcagattcatgacactacagactgaaggggaggcagaataatagtaaccagcattttaccatgcttgctttgtgccaagtactattctaatggctcagctctcacaactgttcatacatgagctcttctcatttctattatacagatatggaaactgaggcagagaaaggatgagttttaagactcaagttacatgctaggggaatgatatacctggaattcatacctagacattattactctccagtctgagatattttctttaaaagacttgaaattcttgttttatatttatatgtataggtgtttctactacatgtatgtttgttcatcctctgtgtgcccagtgcccacagaagctagaagagggctgtaacaggcccccagaccttagcacaactgacaccatgatagaagtgccaatcaagccataaaattcagcatgtagactgcaccacctgccaaaatgaaaacaaaggccatatctatctaggtctgtagttctgggaaagtctcttaatgtaataaccttgttctctggcgtctgtagttctacttttggctaactgttcttattaactgaagtgtgtcaacccagaatttgctttttttttgtacttaaaagctcaccctgagaaaggctcaatgataccctgggatccccaacactcagtgtagttgctgagactttctgttgatgcaaacccatgttcaagtagtcttctctggtggaaacctcacaacaaggggatcagatcctatgggactagagctgcaggcagttgtgagccatcatgtggattctgggacatctaacctaggttccctggaagagcagccagtgctcttaactgcgtagccatctcttaagccctcaagtccatgtcctttactatgaaaccaatgatgccttcatagaggagaaataagaaaatattcttctttgggaacattgaaaatgagagctattcgatatatacaacgtactttaagaaagataatggtctggactaacatggataatgaagatgcagtatacaagagaagagccatgcctcagaaaagatgtagagtttcagaaagttcaggggaaggtgacagtggagggatatttctagatactgagcatcccagcctccatcaattgctagaaggctacatcaaacattgtgacaacgaatagcttctccacacctgtaaaagcttattctctgagctacctgaacaaggcttggagctaaggcttcgtgtgcatgacactcactcctaatcaggcacaaatcaggactggggagacatctcagtgaataagattgcttgttgtgcaagcatgaggaactgagttagatcccagcatccaaataaaaagctgggtattgtctctatgcctataatcccactgtgtgtgtgtgtgtgtgtgtgtgtgtgtgtgtgtgtgtgtgtgtattgtagaggaaaagaaagagaatcactgtgacttcctggtcaccagcattgttccaggtttagcaagagactttgtcttaagggaataaggtggaaagtgatagagaaggacacctgacaccttcatatgacctaggagttcatgagcatggttatgcaaacatgtaatacacacacacacacacacacacacacacacacacacacacacacaccacaccacaccatctccagagtttctgatccaataggaggcatatgtctaccaaactgttaagcattgctgatgatgctgcagaaaacttggaagccattgttttaaagcagaagccaaaaagacgcacaaaagggtccaggatgtgactgaggatattagaagaaagggaacagaaatgaataacagaacgagtgtctgacagtgactactgcctattgataacttattctgagcccaagctaacaaaacacccaacatacattatcattttatcctcaaatcaaagtttatgtgtagttaatacttccatattacagcagagagagaaatgcatacattatgacctttccaagccatacaaatgtagacttaaggctattatgaagtacaaaccttagttggtatcactgcttcagagggtaccactgtgtttcaggatatttgaccatactgtgaaccccaagactgaattacttactggaaaatcctgtgtctagttgtggtatggctgaaccctagcacacacctttaatccaagagctttctgcttgaatgttgtaagcagggttaaataaagtcaatcacaggtcaagagttggagcaagcaaccagttgacaggaagtcagcataggattattaaggaaaaaaaaaacataaagactaagagagagtcaggaggacagatagagagatgcacaggaagtagaagggagggacatttagtttgaggtttttcatttgagacagtgtagaagaaaggagtttttttcagcgacatcagctgaggaggaaggtcaactgattgttttctctgcctctttgagctagcatgcccttgccacagaatctggttcttgagtcattattagtaaatcgaacgattgagatttagataaaaacaacacctctgctgcagagttcagggagccatttgatgtggtgtttggaagtatacaatctctaaatatttcagacagtgacataacaaaacaagagttaatttggtgtgatagtttaatgtgattggcacccataatttcatagggtgtggcactattaggagttacgactttgttggagttggtatggccttgttagaggaagtgtgtcactatgggagtgggcttagaagtttcctatgctcaggatactaccaagtgtctcagacaacttcctgttgcctgcaagatataggattctcagttattctagaaccatgttggcctgcatgcagccatgatccccaccatgattataatggactgaacttctgaaactgtaagtgagccaccccaattaaatgttttcatttataagagttgcggtcatggtgtctcttcacagcaataaaaacccaaactaagacaattaggaaacattattttcattcctaaaggtttcatagcctccccaaacagtgccaccaactggggtacaagtgttcaaatatgtaagcctgtgtgggatattttcaatcaaaccgtaacaagtgcccaccactgggaggggggaaaagaagacaaaatcacatgcaaagatagatgcataaatcctttgaagcaaagatttctgttgtatatgatgtttgtatacagattttgccatcagaggttttcgtcttgaatctgctggatataattcactcatttattgaaaaatattactgagatttactaaaacagtgatttattttatttttaatcatatagatgtatacatgcatgcctacttatacaggtgcccttagagacaagaaggtatcaaatcctctggagttggaggtatattcagttgtgagctgcccagtgtgggtagtgggaaacaaacatgggtcctctgcaagcccagtgtgtattcataaccactaagctccccttctacatattttctttttaaagacaagtcttatattgtacaggctgacctcaggcttcctgtttggatgagggcagccttgaatagctcacccttctgcctctattcctgggattccaggaacacaccaccacgtctggctttcctatattgttcagagatgagaaacaagaggcaagtttcttcagtagttgctttttaccctttcccgaagtccttcacattctagagctttctatggtgtggaccatcttgccacatttggatcagagctggtgtcatctggaaaatcctcaattatctcttcacttttttcactcattcttgttgtaatttccttctgggattgcagtctgtgtgggactgagctccagtcctgacctctgagcttactcatgtcttctgtgtttagatgttcaggcttgagaaactctgggaataaaggcttttaaactagcgcctgttcactgtgtattccgccattctttctctccagtcttctgaattttttcaattgtaagtgtatgggataccacgtgaggacttagtgttatgccagatcctctgggaatggagccacagatagttgtgagtgctggaaattgaacccagtcatctgcaagaacaaccaatgctctgaactcctgagccacctatccagttctcactcacattacttctatttgattcattttgtttaatttcatttatattttgtcactttgattttcaagtttttttttcaaatctgtcttgctagtctcttacagcttgcttttattttcagaccttatttgttcaagcaaatcaaataacttttatgttatatctagtatgtgttaattctagtattggggggttttatctggctaggcctgcagggttatatctgacagttcttagtcatgtagtcattttgtcattttttaaaaatctttacctaatgtcctttgttccattatccatgtaattcttttatgtcatgctgaaatagatttatctacctctggcaatattctagcttccctcttataatctgggaataagaatcaaaacacagtgcaattttattaaaatctcaaagttgaggtttttttttcactctagaaaaggttggacttaggccaaaagcacacacaggactagttatagttctaaaatcttcagatgagttttctttctcctgttcccactgccaagatgaaaagaaatgtctctggtatttgtgaaatggcccagagaataagagaactatggctcttgcaatggacctgggtttggttctcagcacccatgtgacagctacaactgcttgtaatccctgttcctcttctgttcttcaaggagaccaggcatgcacttatatacatgcaggcaaaacactcatccacataaaaaaaaaaaaaaaagaaagatgcctaccttctgctaccttctgtcctgtccttctaagaggaaacttactgaatgggatcacgggcttaaatgaagaacacggttaccctttctactttggatgtgtctttagctttgtctactgtcatgcagttggtagccctcaaaacatgcattcaatttcaccataatttagcagattctggtcggaactagaccttgcatttccataattcctgtcttatcacatcactttggttaagcttcagtatgctgcatgcttttgggccagctcagtgatgcacttaaaatattctaaatatacaaatgtacacacagaggcaatgttttaactgctttcatcagaggtgctgttcggggcacataattgcctgatcaatagaataaagtgcaagtccagagttaagttgaaatgtattataaattaggctaaaacacaagaagaaaaactgtgagtttttcattgaatgctattgttaaatgaaatagcaagcaaaattcccaagggactgaaatgaccagctcccctttgggcagccataacggctgaacatgtgcttgtctgaccttgtcctagacactagaaagtcagatgcctgcctcatgataaggaaccaatcagaagttagctggtggtgctatgctttacgaccctgtgtgtactttacagagaagcgcacagcaaagatgaacagaccatagcaaccaccctgggagggcctatgggccataacaaccagttggccaatcaacacagggcaagccctccaagcctggaggcataccaatcgtgagcctctgcgtacccctagacactccccttacactgccccacaagatttctctccgaagcagttcgagctgtcttttgtgagccatctgccatggcgggtgggtgaaagacccgagataacatggggttagcttgttaaattacaataaagcctcatgcagtttgcatcaagctctcgaatccgcctggtgattggggtaatcgcagtcgtggcctgggaccctggatacctgagttttccgggggtctaacagaacaatatgggttttaattttaaacttaattgtattttatatgtatgagtggtctgtccacctttatggatgtgtaccacatgcatgcccggtgcccaagaaggccagagaggacattggatcccttgaaactggacttgtagaagattgtgagctgccatgtgagtgccgggaactgagcccccatcccctgaaagaatagcaagtgctctagccactgcactatctctacagccccagaaatagtactacgatttttatttccacatttaaagctcgatattgtgcccaagacacagagttctgtgaagaatgaatatcataatgcaaacttctatatggtattgaaagttccaaaggatttaatcaatataagtctattaaatgtatttggaagtgtgcttgagtggcttctgcttgcttagatatttataagatgcacacatgtgcatttattaagccttcctaacattataaaatagtcacagtttgtgcaaagtgagtttctgactcgctaccgggaaggctattaacagacaggtgcaaactcagtgacttccattagcactaacccatttcagactccagctttcaatttattcttatgttaggacgtgtttcattctctggcttcgatgaattttgtgctatgaatttctcttgggttgggcttttgtgagctgagaagagggcaaagtgctgagcataaaattacagaagatagtcttctggagttggtttctcctctccgtggtgtggtgggccacctgacagaagcagcttgaagatgggtttactttggctcacagtttaaagagctgtacccatcgcagttggggaggcatgttatccctagctctgtcattctgggaatcaaggaagcagagagagctggggttctgtgtaatcctcagggtcaactactatagcaacacttcctccaggttgccctcccacccacacccacacacatacaatgctacccaaaaacggcactgccagccaggaaccaaatgttaaaacatgtgggctagcagaggacacttcacattcaaaccttcccagtagtgttccccagaaaatggaggggatctttagactgtgaaagtagactgtgatactgaaactcatgagtctcggggaattctgtgaggccaagtctatggctcagcctgtctgtctggggactccattccacttgttgctaagtggactgaaaactacactgctgagaggtcagagaccacttcaggtcttttaaagaagcttaaagcagatgtgagaatctagcaaactggttctcaaccttgcttttgtcattttactatcttcatttgcaagcaataagtctttgagctctgttccctcacacatttttgtttgtttcttgtttttttgtcttttttgttgtttgttttttgagacagggttctgactaccctgcaactagctctgtataccaggctggccttgaactcagagaaatccccctgcctctgcctccagagtgctggtattaaaggtgtgcaccaccatcactgggcatcacacaacattttaagatctcgttgagacatgaaaaaaagaaaaacttcagaaaccattagcccagccacacagtgtagacacataaggtattgagctataatgatcactattttttgaggggggagctggtgagcagggcttggcacacaataggccaataaatcaataaaatctattgtcttcatagtgtaaacccttgtctacattccttccctgattttagccttccccaactggaggactatggccactccttgttaaaaagaagccacatgtggaggtctattcaaggacaaaagcacttactgtgcagatactcagttaaagaggcaggctggctactatgccctgtggagggatagggagaattctcagcgcctgactccagctccccccaagtctgcagtcctctgttgttcctgtcctgtcctggcagagcttgcacataccattgaatcaaatgctgacatggagctttgtggtcacggccagccacccacatcttcttcatgaaggagcgctgtgtcctactgccagcctcctgaaagaggctagatagagagaagcccgaagtttttagggctgctttgcagactcagagaggcttttctctgtttctttgtttgagaactcccaccttgcctgcaacaatcaagcttgttgatcagaaagacatatggagttctaagaggagatctcaatagaacacaggtttcagaaggatgtgtgtggaggatacacactgtcagacagcagaagagagacactgatcagaacacaaagccggggattatagaatttcttccaaaccctaccccccccccaaaaaaaaaaacacttgccagtcttttacttgatttgtgacattaaagtaattacttagacattctgggcttcaagacacttttctgcagtttgaaagcaaacaattttacagagatatttctatttccctaccacatgcccacttatagacattattaatcactgacatccaggacagagtgtgagagcaagtgactttcatcaggggtggcttcagtactcacaggcagagtgtaatacagtccccatgtctctgcatatcctaaactctaatcctgaccacagattagcatagatagtgcagaaagcccaacacccagattgtgcaaggtgccctcagagatcagaagcggacatctgatttcctgcagctggagaggtaggtgattgtgagttaccagtggtagctgcgaacagaactagagtcctctacaagagccgaatcttagcctctgagccaccttgcaagccccacaagttcttattggtatcatttaaaagtgagcattggcaagtgaaaagcaagcgaactggctagtgattatgctctgcttctacttggtgaatactgtgtactaaatataacaaacagcacaggaaatatgtggtatggtttcagtttcctcaacacacagtgtctgtcagttcatgtaactgtagggcagtgtccttatctgttctcatttttagtcttttgtcacttgtttaattcttttaaaagaaatacctgctaagccaactcaggacccaatagcagcagcatcagcagcatcaacaccatttcctcctcccctctcccctctttctcctcctttttggggagggtgggtcatcaaattattttattataaaacgtgtgtgctatttattagtagtttttctaaaaacacaaacgtgagaactgagcacctatccagagtactagcccctgcagctagggggaccagcacagggtcgccgggctttccttataccccagggtacctcacttgttcctcagtcactccagagctccaagctacctctgacaagggaaaggaaccccctgaaactcccaaccacaggaaggtcacaaccaccttgggctactgatgttaattgctgcacatctaggacaataccaaaacccaccctccaacatctgttcccattgccctttgctgtcctgatgcgctaacctccagcctggcttctgcataccgcagagcacaagcacgaacttgcacatgctgggtccatgctcaggtatgaaggtttgttcaggacagcccaagtcatgcggtccttaaacctctgtagcatctattggagtcacacccttgaacaggctggtcaaaggcagcacaaggcaggagcaagtagacaattgtcccaccaccaaacctgctctccatccaatatggacacccaccccagtcaaagccaaaatcttgacatcagtaagcaactaatattcatatgaaccaggaacccatttctttattaaacggagctcttcaagggtatccggcatgtttttagggagcatcttgagatggcgctggaggatcctggctttcgggttctggaggcggagctggcatagcttcttttttctgggttgctctatctgtggcctgaagatgcgatttagtttgggatccactacctgtccacttctgcttctaacatgcctgactgaaccagactctgcctcagcccatttcgcagctggttcttggttcatgttcattttaggattccattcctgtatgtccagatgtgttgacacaaaattatccactttctgatttggattgtgacttggtgcccacgtcggccaggtagtcccgggggaagtagtcgaacaagcctagcttcttgagctgcttcactatgagggggatgaaccgcaggtctcctcccagaggcagcgatttcgggttgaaaggagagtcctcctccgattcggggttcttgtttaggccctcggtggctgtcctcttacctttggctgggccctttgtggttgccccctcacctttggcccggccctccgcggctgctcccacatctttggccatatccccggcggctgctcccacatcttcggccaggccccctgtggctgctcctgcctctccagcccatggccgggccctgcactcgctcagctgctcctccgcaggtcaagttgcagacacggagggcgccccccggaggtggcagccacagcgatggtgggaggctgcagagcccagggcgcttcctgctctggagcttcttttttaaatagggcttattacgtagcccaggctggccttgaactcacaatccttatggctcagcctcctgagtgttttgattacatacatgcaccaccacacccagctgagtttgtgacctataaggaattctgatagatgtagtggttttcagtttcataggaaaggaagcaaagtaagatacatttagaattttgtgtcctgcattattgacatcttccggtagaaggggatctccgcttcgaacagagtgataaatttcagctctggaatttccttcttaatgaccagaaactttccctaaagatcactgcttcttcacacattttcatactgatttctcctgctctcctcaaatatttaatatcaggcactataggatctattacgtacacaacacatctcatagctgaataaggcatttcagaaatcctggtcaagaacagttagtcctcacaaccggaagaattgtgcccagaagtgaccaaatcgctccagtcctgagctaaatggaacatgaatgcagccaactcccttgcctggttactagacatgcttatggctgctctcatacttcttactcacacaaacatgtatacacacatgcatgcttgtgctagtcaaaggcttgacagagactaaaaaattcagaaggtcaaaacgggagagatgttcccaatgaaaaatgggaaatgtgctgcaaactagtgacacataaaactaggtacaagctcagatctacaggaaggaataacaacagaaaaatagcaaaggaaaacaagtagtcgcgctcgcgcgcgcgcgcgcgcgcgtgtgtgtgtgtgtgtgtgtgtgtatgcatatacatacacatatataatttaaaatgtatatgacttaaacaaaagttgcttaagacagaaaatgtaacactgtagtgtaaagtttatagaagctttacataactaagataccgaaaaacaaagaatggaaacttgtagatataaactgaacttttaaacacaagactctatgaattagtacaatgttaaccctttacatattgtttaagatgaatatttaaatacctagataagacacaagagattcaactgataaagctacaaaatgaagaaatgagttaaaatgaaataccagaatttattcaaagcaggaagagagcaacaatctgagtcagataacacaaacaaaatcaaacccatataaactaagttagtgaaaacaatgtaaatgattaaaacataagatatccatattcagttttaatttttttattactgagattttcatacatgcacataatgtgttttgatcagatctattctttacttcctcccagccctcccacacctccttacacttccctttccctcccaatgccatgtgttcttctttaaacccacaagggcacttagtgctgactgtatgtacatgggtgtagtcatgtgggagcttgggcagcttatcaagggctgattctctgatcaaaactgattcatcctcttctagcagccatctattgataatatgtcctcagctagggaagggactgcataagcccccccttcccatctaatctatgctggcatttcctgtggcttagtcttgtgcaggtcttttacatagattccgtgagctcatgtgtgcaacagtcctgtaatgtctggaagacactgtttcacaatggttgcttactatctctggttcttacaatcaatatgccctctctagcatgatgatctctgagccctgtgggaggaagtctaataaggatatcccatttagagctgggccctaattctactgtctcttattatatgcacttaccacttgtgagtctctgtattaattttcaactaaaggaagtttctctgcaggggtctgagagcctgtgtgtcccaaggtaagtacttacaaagaatttaatactatgcccattaacagaataatagaagtacattctttcctacgaaacccagacacaggttcttggcccagttaacaggtatgagttcattttgtggagcaggctttgaataaaatgtgagtgtgattggttactactataacatttggccactattgcaccattgggcgtatcttgctaaggtgcatgcagaccacagctgggtaagattgatgattacttttctcctcttatagtatgcacagccccttccagtgctgtgaaaccttagccagtaagggtaaagcttccaagtcagtgtcaccttgatatcatttctctaatcctataattcaactatgtggggtgttctgtaatagggttttaccatcaaatagggttttacaatgagaatggcaaaacctgtaaattttgtaagatgagaaataaaagactcagagactggtattagggttcaaacttcaagctgaagatcagaaaagcaaacagctgggcactatctctcactctacttcacaatgaaattcgatcctgactccatcaaacctcagactgaagcctctcttcagtgtggctggagactcctgagacttcaatgtcttcctatcctcagtgtggctggagaatgaatacctgatacggactcctgaagactctgctcctgtcttttatactcctctaatgctgggattaaaggcattatcccaggtgctgaggtcatctttgtgagagagtttctctttaggactgaatcagtcttgtgtagatcagggtggccttggactcacagaaatctatctaccattttttcttagtcctgagtcctaggattaaaggtgtgtaccaccattgcctgatttctatagcttgagaggctggctttgctttctgaatctcaggaaaccttcaatttatcatacataatataacaccataaaattttttattggtctaagtgatcccactgactaacagcttgaaaggaggcaaaacatctgtcacatttgttagacagcctatgttgtgttggggagacgtttacttcttgctatagagtaatacacacacacacacacacacacacacacggggtggggggtcggaattatccatgtcatatagtagtcaaaacactaaatgtgtagaacaattaaaagatgcaagagtaaaagatcaagtcatgtggcttaccatagtaatggctgatttgaaagagcattacacaagccctgactactatactaagtaagactatcatagtaaaatggggggaagggagaaacactttccatgataaaagcaaacaaaaggaatgtgtgaccactgagacagacaatactggaagaaactactttggattgaagaaaagcatagtcaatttttaatttttttcttttttgttttatttgagttataaacacgattgaattacatgacaatcccagttcccttctccatcccctcttcccctaccaccctgcccccactaaaaccctacttatcggatatcctttcttctaatctacgcctgactcaacctttctgctccctcatgacctctgcatcttttttcttcttcccttctcattcttgtagctccctccccccacttcccatgttctcaatttgcttagatgatcttgaccctttccccttctccaggggacaaagtttgtctcttttagggtcctccttgcttactagtttctctggcagtgtggattgtaggctggtaatcccttactttatgtttaaaatccacatatgagtgaatacatattgttattcttttgtttaaaaagaagaaaagagaaatgctgagacagacatattgactataagtttattataaggctaggcagaatggggagactaagaagaggaacagggtaatggctgaccgcctggttgccatagagagagtacataggtgagagagagagagtagaaaggaagctgagaggaaacagagtggggaaacagaaagagggaacagagagtgtaaatgggcagggacttgttttttaaaggggtcctctgcacctgcgtgcagacttagttcccatggaaccttgggctgaccagggtattgcctgttccaccaggtaacaggggcaggccagcataatgcctgaacctttcacacacaagttatttatacgcctatgcatgtaggggacatttattgaaaggaaatgtgatgcaaagaatgtttgtgggaacaaagccttctgggagtatcaatgaagcaaaccttttcgtgctgggattctgttacatctttagcaaaatgtacaggtcttcccaatatgcagtgataattaccatcggcatacactgattttcaattctctctgggatttattggcaagatgttggcagagcagaagacaaggttgagtttaggaaaaactgtttttcttaggtcctgtcattgaggacctaagattgtatgatggggaaggggttcccgaggagtctcaagatgactgaagggaatttgagactggaaaggttgattatctggagtgaatctgacctgtttgtttggatccaattcagctccctggaacttacaagaatccttagagtttgtagaaacataagtattagacacattagtagcatattcacgttagaagcaacttggctaaaagcattaccattttaaaaatagacagatttttttaggacaatgaagagcatcttaatcttgattttgtagttatgatcctatagtggtattggtgaactttattatgaacagtagcatgagaaatagagaagtcaggaacatannnnnnnnnnnnnnnnnnnnnnnnnnnnnnnnnnnnnnnnnnnnnnnnnnnnnnnnnnnnnnnnnnnnnnnnnnnnnnnnnnnnnnnnnnnnnnnnnnnnnnnnnnnnnnnnnnnnnnnnnnnnnnnnnnnnnnnnnnnnnnnnnnnnnnnnnnntggattggcctagggtctggggttaccagcagcacccctaccccaggtctctctgcctgaaggataagattttacctgaatcaatgattaaagaataacagagacttgccagcaggctgcatggacagccacccacaaggtcctccattcatagtattgggctgcaggacacctgccttcttgctgatagcatgtgacctgtggattacagactttgggaagactcgtctaccgttggcccaagcaacgaggggaaagtcgattccattgtcctcttgtccaaggtctggaatactttgtagtagttgagggcagggttgctcagtgaccagcattgtcactgactcgagatgaagctttttcagtgcccatcagtcttcttggaggaaatggggtggggccagcagctggcctatctctctgttatgaaaagctttttaacaaaacattttaaatgccatattctctagatctctgagcatttgaggtctgtctgtttagtatctcagcagttaaaagtttgcctttagttagagaaaaatccctttttgtaatnnnnnnnnnnnnnnnnnnnnnnnnnnnnnnnnnnnnnnnnnnnnnnnnnnnnnnnnnnnnnnnnnnnnnnnnnnnnnnnnnnnnnnnnnnnnnnnnnnnnnnntcgttaaattacaataaagcctcgtgcagtttgcagcaagctctcgaatctgcctggtgattggggtgaccgcgaacctggcctgagaccccggatacttgagttttcgggggtctaacaatatagagctagataagtatacagttaaattacaggtacagagacaagcaggactggataatagtaaaggggaaccagaatgtaatctctgatccatacattgtagcaaatggacaggagatttaaagagacagggtagacttaaaagagggccctggaaaggtacagtatttagtaaacaagccatgaatgacagagccagtgaaagaagaaatcacagacagaaaataaaataaaaagcaaaaagatctggcagaaatcaaaaatctggtagacaggtttgctggcacaggccgctggagtgggtgtgcctacaggtaggtcacatgaccaaaacggcgggtaccatgtctgtttacctgcttgttggatgaaaccagaaaggttcctctatgcatttcccatgggtgaggcaagtggaaaactggcaaaaagctcctctatggatgcatgtctgcccgtgggagttgccaggggtctggccccgaaggggacacagctgtcccgaaaccgaaaaaggacccagcagtctgaaccaagaaagcaccactcctggagcgggatcccatgcctgaccttcaggaaatgcacccaacaagtaaaagaagaaataaaaagcaagatgtctggtggcagtgcttgcctatgcaagtcagtgaactgagtgggcaggcctaagttaggtcatgtggttatgaccaagatggcggcccccaggttagcccacgtggccgatggcagcaaccataagcacattctcaattgccagaaaagtttcaaacctcattcatgtggaaaaatgaaaaccagcaaacaaacaaaaaactcttagagccagggaacagagagaggggacagaggaagggaaccgagagagaacaaacagaacaatgagggacattcccaggtgaaagaaagttcccactgggaggcagaactccgctcatttacatactcgctgacagtaaccgaaagatcccgtaaaaatgtatttcccatgggcaaggccaaaaaatggcacagattgccctgtctaagagcacctggcccgaaaccaaaaatggacccagagtgaacagtgttgggtctgccccaggggaaaggttttgggtatcttactggattgaagcgaataggcagatcagtgagtttaagagatccttagttggaaaagcggcgagttgagttcggcatctcaggctgctacaggcaggaggaagtgccaggaaaagcggagatggaagtgggttatgagtctagattttagggtccctgagatttcccgtgctcctggcaggaagagttacaaagaaagactgtcccaccagctagctttggtagaggttctacggagagagcctaaaccaagttgggcaccaaaatgttattcttttgtttaaaaagaagaagagagaaatgctgagacatgatacataagactataagtttattataaggcccggcagaatggggagactaagaaaaggaacaggggtaaatggctgaccgccacttcacagttcacgaaggctcnnnnnnnnnnnnnnnnnnnagagagaatagaaaggaagctgagaggaaacagagcggggaaacagagagagggaacagagagaaggaacagagagcgtaaatgggaagggacttgatttttaaaggggtcctctgcacctgcgtgcagacttagttctcatggaaccttgggctgaccagggtattgccagttccatcaggtaacaggggcaggccagcataatgcctgaacctttcacatatcatgtttgtctttttgtgattgggttatctcgctcagaatggtttcttagagttccatccattttcatgcaaatttcaagattccattgtttttttttgctgagtagtactccattgtgtaaatggagtacttttctctacccattctttggtagaggggcatgtaggctgcttccagtttctggctattacaaatagtgctgctatgaacatcattcaacagatgtctttgttgtatgaatgtgcacaaaaggcttgggtctatctgtggtcttctacatgtctgcatccagttatgccagcaccattgttaaagatgttctctttgttccagtgtatgtatttggattgtttgtcaaaaatcaggtgtttgtagatgtgtgggttaatattagggttttcaactgtattccattggtctacctgtctatttttgtgccaataccaagctgttttcagggctatagctctaatagagcttgaagtcagggatggtgatccctccagaagttcctctattgttcagggttgttttaattttttaactctttttggcacttgggggtatgactcagagcctggcacattctaggaaaggcctctactactgagtaacatactaatctccagcttttacttctttttcatttttagaattaacttgtatgtatgttagtgtacacatgtgaaagacccccgaagaggtactttcgtagagggagacccacacacccaggaatcagcgaggccacgaactggatgcaaaatcaagaggctttattggagacgcaggtacccggggcgacttagcctttgtgtggctaagcgccccgagccaagggaaaggggtccttatatagggaaaaaggcgcaagctaggagcagggattctattggataattctaatgaggcattatacagagctattcccattggtcaatgtatatgaggcgctatacagggttattcaaatgaggcaaagtacagagttattcaaatgaggtgaaacacagagtctttcaaatgaggcgaaatacagaatcatttccattggatggttcaaataaaacagtatttgtttttttttctagttttcttatatatttgaattacaaacaagattgaattacatgacaatcctagttcccttctccctcccttcctcctctaccaccaacccccaactaaaatcctacctatcatatgtcctttcttcttatctacacctgactcaaaatttctgcttcctcatgacctctgcatcctttctttccttctcactctcgtagcttcctcttcccctcttcccatgttctcaatttgctcaggggatgatgaccctttccctttctccaggggacaaaatttgtctcttttagggtcttccttgtttactagtttctctgccagtataaaacagtatttgttacttaatgaacagggcagaaggaagttcaggagtctagagaatataacacgttatctcctagtgctttgagtggcagggcccttgcatgtgtgatcctccagcatgttgccagcatctccactcagtggcatgttcattttgaaacactagaggggaggcagttagcaaatacctgggaatttcagttctgagttgtgtgaggctaagacactttttcatcctgcctcagaaaatgccaagcccagaggatgctgttaagggtgctttgatgtcagtactatttaacgtttttagatgttacttaccaggattggtgtgggggggtagttaatatagaaagggaaaatcagagttagcctcaatcatccaacacatatttattgcatttccgttttacatagggcacagagtagataggatctagctttcacctgacccagacccttttctccaggtgcttacaatgcagggattggaagaaggaacacagatcacggcaatccatgctgtgagtattgtgatagagttcggttgaggacacaggggtgcacacagcaggtctgtgttcagccagcagaagatttgaaagctaggatagcttgctgggataggaggaatgaatttgtctgagccaggtgaatgtatgtaaggatcaaaggacatgacaatgaaggaggtggaagtagtgatgggattgggggtgatggaaataatctaagcagagagggacttaatggcagggacatagccaatgctacactgcctgaaatggccttaacatgttgcctaatacttgttactcttgttgtgatacgagtttgtaggcagagacgggcagttattgaatgtacggataattgtgcaacataatccaataattactgtatgagcaagagatgagagttattgacccagaaattccctgtaaaagggctttctcagtccttctagttcccagagagcgcttgtgctgatgttggggggcggggagggaatctacacttttgccccttctgtctaagtaggtcagtatttgctgacactctggaagcctgtgttatttctcagtctgctagaacacttcactaatgaggagtaggtcatgggtttaatcccctcttgggcctcttagtttctctctgttctgtagccgcagacagcacccttaaccctgtgctatgctttctcaaatgccagtggctagcccagaaggctgatgagaccttgtggacagattagagaaaactcatctccactcagccccatactcacaggagtatggctttcagtgagaattcctgtgacctggcttcatcaatgtgactgtggtttgccaagaatgctaaaagcatttactgaactcttattgtatctctctcctcagctcctgctnnnnnnnnnnnnnnnnnnnnnnnnnnnnngaacatttgcacaaaggctataatcagaaaatttgctcttcttcagtggaaactaagaagatttatcaagtgtctgttgaattgggagagtctcactaaattctccagtaagaagtcccaaggcactaactcatgcacatcaaagcacaatttcaaaaatctgtatataatgtgatcattttgcaatactatccatagccccaggcctgagctgggcatctgtgtgctcatcacacagctaaacagggaaaagttcattcaatgttcaataaagcatgtcaaaactcaagctgatcaagtccatttcactatcaatccaacccacaactgtatgagctgttgtggattcttgtgggtgcccaccataactaaagcataaggtcatactacagaagacaccacataccttgattgtaagtgaaagataaaacaggatggactttaattgggaacttccttcatgctggtaagcatccaatacactagtgggtactaagtgggctgttgggggtgaaagggcatcatagatcttgccaatggttcactgtgaaccatgtgaatcagaagtccattcctctcacagtggattaactgctgtggagagaaccaaggatcctctgtttggatttgaggactgctctgtggaggtgaggggaatggggaatccatactgatactataagtccagctagccacccagctccgggataaatcagagacacgttttgtttacaatgaatggtggtaaattagagactcaagtctccccaaagtacagagaataagagttagttatgggctcagccctaaacaaatcgcttataccaccctctctaaggctcagggaacactgcagaagagagggtaggaattgtataagagcaagaagatggagtcaagcgtgtgagtagacaggggtggtaggaaggtgggagtgggattggtcagtgttcattgtgcacatgggtgaattgcctaataacaaatttaattaaaaacttaaaaattatttttagcaaatcaagctcatttgcattttcatataaagtttagaatcatatcatatatgtctgcaaaaatcgttatggggttttgacaggaattgcattgtatctacatatgcacataaggaaaactgtcatattgactgtagtgaatcttctaatctataaagaatagagattcacatgttcagaccctgtgataggctattatcagtgtcttgtagcttcatagcacatgttttgttaagatttacatttacttcttttactctagagtgaatgtaatgctgttatatttattttttgttggtttctgtgagctttttcttagtatataaatgtaccatgtctgtgttttggtctttatcctatatcctaagtttataggttaccagaatttttatacatttctggagcccttctgcatcatttatcatgacacatctccgtatgtcctgggattccttctttcctgaccctgttttgtgctctgatcacattcttcagtcattacttcccacaacatcagcccatgataaactcaatcaagtttcctggtcaagaatgtttcctttactgttctttccccaaggatgtttttattaggaatagaaaacttcttttaaattcgaaaaacattgggccactttgttcttgaccttatggcttctgtggagagatgaactacgaatcttaactgtgttcctttggatgtttccaagactttagctttgtatggtttctcaaagtgtaagtgtgcctcatagtgggttccatttgggctttcttgtttggatcatctcagctttgttaatttgctagaaagggcacctggtctttgaagattgtgcagctgacaagtagaaaaacacaaattagaacttgcctgtttccagagtgtctcctcatggctcctacacccttcaacataggtttctattagttagattgtcttgccttgaacaaggatttcttctgggaatccatgaagaggccccgggtaaaaaccatgtaaaattttttcttttataataaatatgactcacgtggatttacaacttggacatgtgtagaacaagggaaacagggtggtcgtttgaacattggctcttttgaaactgtcttctaacagccagatggtaagggccaaaatgacatccttctgggagagtacttgtttacataaagatttctttctagatgtatttccctctatagaaccttctccgttgtagagggcacgaggtccacatgctctcaaataagtattagagaaaccagaaatgttaaacatgcaggcttttctcttcaacagaaggaatttatgcttgtttcatccagaaggccagaggaatggatgctatttagtagcctggtgatcttttactctctgtagggccaggtctgttggatccaaaacacccttctgaccctgcccctctgacaacagatggggcatgcacagtcgtggccaagtcatcactgtgtaaggactctgcacagggtaaggactcagtgggcatgctcggactttcccttttaagctagcaagcaccctcaccccccctttccctttctaccaataaactccacctgggtttgttgatcctcggattgtgtttcactactggtcgctgcagctaaataacaacaaggtctcccaaataacccactctaatgaaagatgtctcatgtaccttacaaaagaatttgctattatggttattacaaacccttcctccttagaccctcatcctgagcactgtcctaagccacaagaacacattcttgtggaagaagtcacagatactgtgcaaaagacatgtagtttgtaagggtgtttccatgtatccatgccataagctttgttgtgataattgtcataaggaaccttttttccaaagttgtattgtgcttaaatatgtaaagaataagcttctcggggtcaaaccacagaagtttgaagcagcttggctcactcagtaatactgcactgagttttcttcttagttcctgaggatggaggatcctttctgtgcaggcagtagagcttgcagagatcctcacactctgtgactggagagcttcattacagttctttattctgcacactcagggcacattcttaacttctgtgagataagcttccttttaattgtttattgccccctcccccctttctccatgtgtaggccaggggttccctgctgttgttctttaggcacagtttggaaggttcaggcattatgctggcctgcccctgttacctggcagaatccactcaggcagtaccctggtcagcccagggttccatgggaactaagtctgcaggcaagcgtagaggacccctttaaaagacagacccctgcccatttatgctctctctgcccctcttctcttctctctgcctctttctctcaatgggccatggcggtcagccattaaccctgttcctcttctctcttagtctttctactctgccaggcctataataaactggttaatatgtctcttagtatcatgtctcatcttttgccgtttctttatttctaatttaagcaaaagaataacacagttcaccttgactttttttgagacagggcctctcactgaacaataacttaccacttcagcttggctaactagcgatcaaacccccagggcctatctacctgtctctctgttcccagcactgggattacaaatatgtactactgaagggaccagcttcccttttggcagccataacgactgaacacgtgcttccatgaccttgtcctagacactagaaagtcagatgcctgcctcgtgacaaggaaccaatcagaagttagctggtggcgctatgctttacgaccctgggtgtgctttacggacaagcgcacagcaatgatgtagagagcatagcaaccaccctgggagggcctatgggccataannnnnnnnnnnnnnnnnnnnnnnnnnnnnnnnnnnnnnnnnnnnnnnnnnnnnnnnnnnnnnnnnnnnnnnnnnnnnnnnnnnnnnnnnnnnnnnnnnnnnnnnnnnnnnnnnnnnnnnnnnnnnnnnnnnnnnnnnnnnnnnnnnnnnnnnnnnnnnnnnnnnnnnnnnnnnnnnnnnnnnnnnnnnnnnnnnnnnnnnnnnnnnnnnnnnnnnnnnnnnnnnnnnnnnnnnnnnnnnnnnnnncagcaagctctcgaatccacctggtgattggggtgactgtgaacgtggcctgggaccccggatacttgagttttcgggggtctaacatttggcgtctcgtctgcgatttgtgaccacccctcacctgagtggattcgatcttagaggtaagatgattcgagctcacaacttatatgttcaatgttatatgtttgcttgttatgtctcttgctgttttgttggtttggtgccatgacttgaatttgatttgtaatttaaatttgtaattcagacttcagggggaaatagatctgagcctgcgcagaatttgtaacgtgtttcgagatcctgaagtcccaccctggacaaaagtccgaggcttatttgaattgaaccatagggtaagcagacatgctggcccagaaatagacatatttctggaacccttggttccgccctagacgaaagtccaagggttgtttgtagttttagtttggggcaccttttctttgcctcggtttgtcctgtctaatgtctgtcctgtctaatgtctgttaagcctggaggattggaatgggctgggtgactgaacagttaagcaacaggtttgttatctgttatctgatctgttgcagcccacaccctaaccgcctgcttgtgtgtcaattttactatttctgttaattttgtaaatgtaaaggctctatattagggtttacaagaattgtttagggcggaggtttgggcggcagccttccgaaatctataggggagacttgctttcgaagcaagttgatctccatggggctagccatctgaaattctgaataggaccctagtctatgttaaacatctctttctgtccctactgcccacgtacatggcatgcatgagtcaggggtcttttcttgatgctctgagcacgtggtgccacctcaactgtgatcggcgcccggaggacagactgctgcactgaggacacccaggaggtacgaacggaggccaagggcttggatcctcctcagttagcggtgatttagctgccgggttctgctggcaccattgccttataagcagcgcgggtggattgggttggcatctgttctttcctgtctattctgtgttatcatcattgtttttcaattcaggatccaccacgccactccctttctatcccccccacctgcgggtctgtgaggcattccaagtggggctgtttctgtcccagctacggtcctgcctgccatgggagttccctgctctgagggaacatggctgcaaggctgccatctgcctggctgcccggccttctctgtgctccacatacatggtatgcagaggggcctcgggggtctttttcccacccctgcattggccgagggtctggggttaccagcagtacccccaccccaggtcactctgccttgagcatatggagctcgagcgtatgaacttatctgacctgatccggacttctaaaaaaaggcattannnnnnnnnnnnnnnnnnggccttaaagttattaagaactgtaaaagggactttgataaaatttttatgttgactgaaaaatgaggggaaatgtatgagacttaaataataaagagagaaaggaaaaaaattgtctaagaatgtctaagaaagtcagagaaatgaactaaaaggttatagagagttaaagcaagtcgtagaaggtcagagaaaaggttgttacaagtcagagaaaaatgtaaactataaactgtgctatggtttcccatgtctacaaataataaatttttaaaaatagtaacataagttaaaattttaaccatattaagctaattctgtttttttaaaaaagtcctgtttatttctcaagtaatttatgtatacttgttttaaaatgttctatttcctggtataacctaagttctgttacaagcatgttaagcaaagggtgcaagttacggacattttgtaaccagccacatggcaaactggtcacatggctgactggtagccattttgctaaagttaaaaaaggatacttaaaccgccatcttgactaaaggtgactgcatggaaattagaggtaccatcttagaaacaagtttttcagttaagatttaaaatgttaatgcttctatatattacagaagacattaagggaatttaaatttctttttaaaaccagtttttttaaatgtttgtttttattaatgtttgtacttaaagagcttcaatttagaattatttttaagcaaagtctgacaatgtaaagttcttgttttgtgaaagatgctaatctattataagatattacagtttatgtttttaaaagttaagtttaggatgttggcagcacacacctttaagctcagggtgttgatggcacacccctttaagtttagggcgttggtggcatacgcctttaatccaagcactcagaaggaagaggcagatggatctttatgagttcaaggcctgcctggtctggcagatcgaattccaggacaggctccaaatatgtacatgtagctactgtttaaggannnnnnnnnnnnnnnnnnnnnnnnnnnnnnnnnnnnnnnnnnnnnnnnnnnnnnnnnnnnnnnnnnnnnnnnnnnnnnnnnnnnnnnnnnnnnnnnnnnnnnnnnnnnnnnnnnnnnnnnnnnnnnnnnnnnnnnnnnnnnnnnnnnnnnnnnnnnnnnnnnnnnnnnnnnnnnnnnnnnnnnnnnnnnnnnnnnnnnnnnnnnnnnnnnnnnnnnnnnnnnnnnnnnnnnnnnnnnnnnnnnnnnnnnnnnnnnnnnnnnnnnnnnnnnnnnnnnnnnnnnnnnnnnnnnnnnnnnnnnnnnnnnnnnnnnnnnnnnnnnnnnnnnnnnnnnnnnnnnnnnnnnnnnnnnnnnnnnnnnnnnnnnnnnnnnnnnnnnnnnnnnnnnnnnnnnnnnnnnnnnnnnnnnnnnnnnnnnnnnnnnnnnnnnnnnnnnnnnnnnnnnnnnnnnnnnnnnnnnnnnnnnnnnnnnnnnnnnnnnnnnnnnnnnnnnnnnnnnnnnnnnnnnnnnnnnnnnnnnnnnnnnnnnnnnnnnnnnnnnnnnnnnnnnnnnnnnnnnnnnnnnnnnnnnnnnnnnnnnnnnnnnnnnnnnnnnnnnnnnnnnnnnnnnnnnnnnnnnnnnnnnnnnnnnnnnnnnnnnnnnnnnnnnnnnnnnnnnnnnnnnnnnnnnnnnnnnnnnnnnnnnnnnnnnnnnnnnnnnnnnnnnnnnnnnnnnnnnnnnnnnnnnnnnnnnnnnnnnnnnnnnnnnnnnnnnnnnnnnnnnnnnnnnnnnnnnnnnnnnnnnnnnnnnnnnnnnnnnnnnnnnnnnnnnnnnnnnnnnnnnnnnnnnnnnnnnnnnnnnnnnnnnnnnnnnnnnnnnnnnnnnnnnnnnnnnnnnnnnnnnnnnnnnnnnnnnnnnnnnnnnnnnnnnnnnnnnnnnnnnnnnnnnnnnnnnnnnnnnnnnnnnnnnnnnnnnnnnnnnnnnnnnnnnnnnnnnnnnncactagaaagtcagatgcctgtcttgtgacaaggagccaatcagaggttagctggtggcgctatgctttatggctctgggtgtgctttacggacaagcgcacagcaatgacgtagagagcatagcaaccaccctgggagggcctatgggccataacaaccagttgaccaatcaacacagggcaagccctctaagcctggaggcacaccaatcatgagcctgtgcgtacccctacacactccccttacgctgtcctataagatctcttgggaggccctaggagccgtctttttctagccatccgccatggcggatgggtgaaagacccgagctaacatggagttagctcgttaaattgcaataaagcctcttgcagtttgcagcaagctctcgaatccacctggtgattgaggtgaccgagaacgtggcctgggaccctgaatacttgagtgtttgggggtctaacactaccacatttggcctcttcatatgggttctggggaatgaactcatacccttgtgttcactaggcaagcatgatactgaatgagttatcccccccaggtctagattcgtctctgatctggaaggcaacagagctaacctacaaaaccatcttagaaattcatccagggctcaattatttgcttaatattaaatgttttatgagtgtattgctatagttagtagttatatactgctataaaatgaagtgttagctgctaaggatttcataatttaccaaggaagacaaaatactagtgaaacatgatatgttagtagatagaaaccaagaagatgtaaataaccccaatgcagggaggcggcattgataagaccttaaagaggtctcaggagtggtgatacagtgccaggttccaaaaaaaacttcaagttcttcagttcatggtggcagttctggtagggaagggggttcccagtagagggaggagaagcctctgtgaaggtctggaggtgtggtgaacagagtgcctctggcatctctaattggatttgactggggctcagggagcataatgaggtataggcagatagagttctggtcacaaaaaggccattctacctcttgcccacaagggaatctgaatgtgacagtgggggtaagaggtattaatttatatccaaactggaaaacaactcaaaatacaaggctggctgctgacgaattagttgtgtagatgttaggtcctatgggggctggtgcagaagcatggcggctgactggacctgctctcagacagtggggaggaaacctactaagtaggagtctttggagtcctactgtgggtaaacagctttgcttagagctctaccctctgggcaaatagcaagctgttttagaggggaagagactcagctgggggtagctggtgttggaagaaggagctgcctggacttgctcaggtttctgagttcacaagtagatcacaggaagctgagaaatcccaaaaggtaagtgtgagaagaaagtctgggcaaagccaagggggtgtttaaacctaagcaggtgagttgggagacgggtgccctgtgtggggtggtcaggagatggtatagtacatgagtccnnnnnnnnnnnnnnnnnnnnnnnnnnnnnnnnnnnnnnnnnnnnnnnnnnnnnnnnnnnccttccttgaaattgtagtaacaatagctgacatgtttctgagcttgtgttgtctcatgcatggttctaatacagctcaggctgttttcctccacgaaggggcaaacttatttttcactgtaaacctcatgcccaacctctagagaagattgagaaagagatatggagttcattggctatggttggataatttaaatctagactaagcaaggagagcagggaagggaggggagaaagagaatggaaattgaggatatttgcaatgtgtacaagtcatccttagtgtggagaaagggaaatatcacagagcacaacaatgatgctatcaaaactgttttcatggtctcatgaaatgttcagtagtccagatacattaatcacccacactcttgggcattacttcttaacctgctcttccagttgtcagctgcaactcattttacctcttggcattagaagaaactccatgttcaaacctgaagcttgcatctaaaagacttctcccatggtggaaaactgacacttgctttttctctggggttcatattgtgcagccccaatccagattaaagtccccctcctaaggtcaaggcacagtgagtgtactgaggctagaccagagcttgagaagataatcatgagtaaagttccaaatgcttccaacacatgattctaaatcctggtaagatgactgcttgattctattctcacccaggcaaaattcaggaatggagcaaaacacccctgtcaagcatgtgggagaaacagtccaagtgcccttcaaagaatctggatatcttggggatgggggtcaggatcttggaggagttggggtagtcaaggctttgtatctctccttgaaatgtacactgctgggcctgagacagaagttgctctgtctgaactttctctgaccttgagaggaaagagaattatgataaatttaggaagaacacttgactgtgtaacagaccctcaagtttcttcactaggaacagagaagtgatcagaccaagcagaccgacacttggagctattttgagaattttttttcttattatttattttgagaatcttaagaagatacctgccttagttgttggctattattgctatgatgaaacaccatgaccaaagcaactcaaggaggaaagggcttattaaactaatgcttccttatcactgttcatcattgaaggaagtcaggacaggaactcaaatacggcaggaacctggagatttggagttgatgtaaaggccatagaggagtgttgcttactggcttgctcttcagggtgctttactcagcctgctttcttataggacccatgaccaccagtgcaggggtggctccactggcaatagactgggccctctctttcccactaattaagaaaatgttctacagttttgtctacttaagttggatcttctgaaggcattttatcaattggggttctcccctttgatgactatagcttgtgtcaaattgacataaaattagctatctttacaatataagaggatgggagcagcaccatccatgctactccctgtcctacttatcttaggctatcaacttagcacagcctaaaatcttctgggaaaaatgtcttaattgagtaattgtctttgtcagttgggtttatagacatataagggattgtcttgattattaattgatgcaggagagctcaggccatggcgggtggcaccattccctggtacagagtcctgagcggtataaggaatttaatgagtgagccagcaagcaagcttcctccattatttctgctttcagaccctgtttgaactcctggtatgagttctcttaacaatggactgtaacctgtaagttgaaataaaccctctcctctattatgttgcctttggtcagtgttttatcatagcatcaggaaggaaacaatatcatgtcccacaccttgaataactacagagtgctctttgtgatcttggactgacctaagaatgggtaccttaaagtctacttttgcattatttttcatttctattctattttaaaaaaaacaaacttcaaattatttgagggtattattgtcttcaagtacccaaaatgttcagttcatacattcttgtgttcatatgttccacagttgttgataggatgtcttgaacttaatttccttggttctaatgacactcaactccccaagagacaggtggcaggaagatatcttagaaacacaaagatcctttattgcagctgtgtcaagatggtgtgaaggggacagccagaaatttcaggacagccaaagtctccctatagaaaaggaaatgaagaaagccctgcttttcacgtcttgttcctcttttctgttgactcagtcacagaagtttgtcagcttttcttgtggagattgaagtgggaagcaggtactagcaacactggccaccttcaagctgcctccagtgcctcatgatgggattagtgttgcaggttgagctttttagatatgtcagggtctgaggtgtgagggatattacacaaatagtgggctttggtatctgtcagggtgaaactcttgccttttctgtattgtttcaggataagataagggtgaggcttttgcttcacatccattgaaggaaaagttctttcttatctccagcatgtaaaatatgctttgggaatggactaggcatttcctgtcctcagcctgtcccatgaggaggttgatgagaagtaatgatggcttgcttcatgcagtggtctcagcctatttaaccaaatgatttggattgaatcttgtttttagcttccctctcataaaggtaaagaaattactgcatgatctcacccttggcctgcagccctgagctgtcataccagtaaatccatgatagcagagtcagcataccaaaatgtatcaaaatggctagacctggaaacaggaggccttttttccacacgaattttattcttaatgattcaagcctgtgattttcttctgaggaacttctttggtcaagtagggggagggaagagagaagagatgaagtggagcaggggggataaagccttcactaactcactcaggtgagtttcctcgtcatatcatcaagattcaggtggatgcatacctgggcctttgtgaagggcactgcacaaatgtgtgtggacctttcccatgttttagaagtatagccaccaaggaatacagctaatatttgctctgcttttgagtaaaacacaaaacagccccccttcttttggtactcctatgttttggaattctgcaaatctccagcctgctgtttgacttgctccagttggcatcttgccctacagcccttacccttgttccctccagtgagtatgccaggcagcatgtttgctttgcccagagcctccccaggggcaagcaggagcttgagctctttgctggatgcaagcatttcaaataagacctgcatgctcaacagaaccccaaggagctgcacagggggaatctggatgaagctgcaaccctggctccaccttcatctctcatatgtccccagtccctaatcctgtctgcccatgagcccagtatctcacccgaagttctgtcttggaatcacattgctgatacaagtgtatccagcttctcatagctgtaaacttgcataggtatttaaagaacaaacaatttagaaacatttggtggcctcaacctacatggtaacaatgcgatgatctcagcaggtgcaagggaataagacaggcgaggtgtgaggcagcttcatggaagagaagggtattttgcccttctgtgattcatgtactctaaacccttttaggaagtcaacagagacttctgagaacctcagtgtaggcttcactttcaaggcaggaagtaagatggcagctgactgccttcccttgctccctctgcttatcctttttaggctccgtgggatgaagggcagcagatctctctttagatacaaacccattgatagccctgcctgtgtgcagacccatatatttttcccaccttgccattgagaggaaacaggaacatgagctggttcatcccttctttcattgaccaaaggacttgtccccaaagtcaccattaaattatctcccctgtctccttcattgacagcttgtcctctgcaaagtgatttccattaatggaattcactctagtgcttcccatcttagctggcaatgcatttctctgccctagttttaatcaaagctcttccaagcatctttacatatttgtctagctattagccccctacattggtttaaaacattccactcacatctgtttctccaaccttctttgactctgatcaaggtcactaatgattttcatctaagtcaaaagtttgatcgtatcttttatgatgcccaagctatgcagtgcctgttcattcttgtctctaaagccccgtgctctactccctgtgtccaaagtcccttgatctactcctgtctccaaagtcccttgatctactcctgtctccaaagccccgtgctctactcctgactccaaagccccgtgctctactccctgtctccaaagtcccttgatctacgcctgtctccaaagtcccttgatctactcctgtctccaaagccccgtgctctactcctgtctccaaagccccgtgctctactcctgtttccaaagcccagcactctactactgtactgctgcgctctactgctttctcttcctgaaacaagctttattcaggccttaaacagcttctttctgcaccttgtttgaatctttgcttagggaggcttccctgacatcctagctgtaaatgaatcaatcccttgccatgcccggattcagcctctcttcctcaccctactctgccttccatcttagcactcaacattactgaaatggcctatttatttgtaggtcatcaactctagaacagagccactcactccctccacatccccagcacctacccctcagtaagaactatgagagcagggtccatgcctaaggagctagtagtctcactgggagtgatgctggtggtatggcccacagtatttatactggctgatcagactcttcctgaaggcactgtgactacagaacatgtctactaggctttggagacttctgtgacttgcctaccattacacagtggtcaacagaaaaaccaaccactgaatgaagaccgctctgatccagtgctgtgttcttcagcatggagggctttgaccttgaagatcaaactgcatctgaaaaggttaccacagtctgttcaggtcgtattcctgaggacacagcagttctgcccacttgtggacaggcaacacccgtttctgcttgcctggaagaaaagaacgctgacttcactcatttcactctgaaagcagtctttgtgccagaagccaaaacacacaggcttggtaaatattttgtacttggttataatagcaaggacccaaatgcagttagtgctggctcagtgagatactgttgtttaccagttttaggaaatacataggttcagcattggcttgaagatgacccttagctgtatttcagctgagagttttagaattaaaaccttcccatgtctttcagcttctttctgaagtcagcatggtttgttctctgtcatggtttataggcagatttggtgcaaggccctgactgtggagtccagggtctggggtcttccagcctgtggttaatgactgggtgaggaacttgctgtctagaagaggagagaggggcatgcaggctggctgagactggcaggctcctttctgaccagctgcagatgtgatcttaatatgtctaccaatctcattaaacaataaaaaaaacccagtgaaattaattttaacagcagatgtcaggtaatgcaatatactcaaaatatcattgcaataagtggtatctatagctatgtaatcttcaagtctggttgtagtttacatccacagcatatctgagattagctgagtggccacatatggctggtaacttttttgctagagaaggcatctcctaatagtgagagtgggtttggggtgctgagacttagatctttatattgagctgaagaggcccagttgaatttctcttggggtctggcagagagcaaatttgatgccatccactgacctgctatcttcacatttgaagacagtctctttttgtgcctttcctctctgaattaactgctttcctgcctcccccgctgtttctgatggtggcatcttgttcctgggaacagattccagactttcaatgtccattggaaagtggccacgtgcagccccagcaccctcaagtagatagaacccatgaattcttacattactcctggggcgtgtctgtcacaggttctttatcccacaaatgccttaccatggtttccatggcaaatcttgcttatggtctttgtatgatgtgcctggatatgagccatagtggacacatgacccctgcttcatctaattctgcagaatgcagagaataacattaaagaaaatgccacagttaaacaatgtgagaacatgctaatgaccatgacatgtgtttttttctcttagaatcagacattcaagacagttttttgatgcacgatctagtgtactaatgtaataggccacctccactaatcattaacaatttaaattttttttcaacacacatttttattctttaattactactcatatttacatatccatccccccattcccttgccctcccatcatcccaagttccccccaaccgaccccccagctcctccccagggatagtgaagccctccacaagggaccttcaaagtccatcatatcatttgggggagcacctaggccctccttgctgtatctgagctgcaatagtatccctccatagggaatgggcccccaaagtccactctagggataaagaatggttccactgttagaggtcccatagactgtcttggcctcctagctggcacccacattcagagggcttggtttggtccaatgctatttccccagctttatgactagagttccatgctctcactaggtcaggttaactgtttcttcaggtttctgcaccaccgtcttgtctcctttgctcatccctcttccctctccacaactggattccagtagtatggttcagtacttagctgtgggtgcctgtttctgcttcgaacagctactggatgaaggctcttcttcgagggaccatgaaatcttctcttggggtcctccttgtttcctagctcctctggcagtgtggcaatttttaaaaatttaagcaaactttgtaaaagcttttacatcaaaagttaaacatttaaaagaaaggtttattcatttttattttacatgtataggtgttttgcctgcgtgtgcatctgggtaccagatgatcatggagtccaggcattggattcccctgcaacaggagttacaggtggtcgtgagccaccacatcagtgctgggaattgaacctggatcctcagggagaacagtcagttctcataactgctgagtcacctctccagcccctgaagctaaaatttgagtatgttccatctacagacaaagccttgcaacttcagagcattctgagtgactgttcagtgacatggaactgctagatattttattaaactagtctgcatccatccatttgcattgtccttacccaggaagttcctgctcatccttgtgttttgttttatttggcaccacgtttaccatatttaggatgattcttaaaatattttcatcatatttcgtgatatatgtttgcatatgccacagtcagaggagaactttaggagtcggttctttccaaacatgtgggtcttaggaattgaatatagttcaattcaaacttggtagcaggtgaccttacggccaggcaggccaatttgggacaattcttgttttctcctgcactgttgtatgctgtccctttgtcttgagtgtgtgtgtgtgtatgtgtgtgtgtgtgcacccagccctcctgaattacaaaatgtgttaaagacatagctcagccctggtagctgatgtttgtagcaggtagaaagtaagtgctcagtaaactcttgctgattaaatacagtttgctaaagtaattgtcatcgtcaaatcatcatcactcctgatttaaaactgaagtgttggagcttgtcagtggccagcaaggctgtcgttcaaggtcaaagcttctgaccctgatgtaatgctgtcatcagaaaactagttgcacatgcttcatgtccttccctctgtttgcagctcctcaaaccgcaggcctttgtgatctcactgaagaggaaagctaaagtgcaagccccagaaaggaagacagtgccgaaaaggagcatctaataacatggaggctttgaacactgaagccacgcgggctctgggtgacccatactgagcctggcaccctgctatgcagggacaaacaagtcatttctagtcatctctcagcttcccatggaaaatcttgctagttagttgatatgctatgtttttaaattgtttatgaataatctcccttgctatgtagtctagcataacagtgatgataattaataaataataataataataatatttagtttgaatactattaattttgcctatacaaattagacatgtttattgttaaaaatttgaaaaaatataattttaatataatgtaggaaaaattatccctaaccaattaatcctttattttctttacaaatactagcaattctctaatttgacatatgtcattacattttaacataatgtgttgaacattttattaaatataatatatcaaatacacacaatatatatatgtgtgtgtgcatacgtatgtatatatgtatatatacatatatatatgaattctaaatgtgtatgtttagtatttccctgcatcaaattctgtaagtaatatggcagtatttattcttggacattaatctttgcactcaggactttttaagagacatttttcccctgatttatttggtcatatgctgtaccaggccttatgcagataaatccctacaactggtcccacgcctcaaggcgcttacaggactctgtcctcagaaataataggattaaaccaaggattagaagaatttctggctcctaagtactcagtgtggattggctaattggggttctttttattatctccccattttcttgctgtctgaaaagtagggtgagagctactttgaattcaagctggtcatcatctctgccgtaaaggcagtggtgactgacagaaggagggacagagacacagagacagacagacagacagacagagagggagggagagagaaagggagagagggagagagggagagagggagagagagagagagagagagagagagagagagagagagagagagagagagaggcaagatgcccgtacatattccttttagatcacagagcctctggcaggcctgcttctccaagttctcagaccatggctctctctcacactgataggccttaacatttagaggacacacacattacagatttccagggagaaagcaaactctgaccctccccgtctcagttgcaagataaaatgatggtcctacccagcgcctggctggtgcctgtcaggagttgagtagactagcccagactaaatagtgtggagcttcctgccactccatgaaaggatggggaagacaggatttccctgaaagcttgctccctccggtcttgttcccttaggcctcactatcattttgtacttgaaggctatctttcattactcttttaccttaaactgtattttaacattctcataaagttcagaatgctctctacctcaagacctccaggtctttgaatggaaacctctctttttttcatgtcttcaaggttccaccatattgtctctgattgatactgtgttccaccaagttgctctcctgcttcagagttgtcctacctcttaccccattgtttgcctccccctagcactcaccccatggtttgccccctccaccactcatgctgtggttccatggtttgccttacatctctcacccctgtggtttctaggctctcccctaataaaccccattctgaagagtgattgatctgagcttctttgtccagctccctccaaccctttggttataatagtcctctcttttcagtctgtttaactcagaagcaaaaagaaaagcaactacccaagttaacattgccctggggcagaagaatggctgtgagttgaaccagtagcttgaaatgcagttgccattatgacccttgcagactccaagaaaatgcagggatgaactcactgcattggaacaacatgctcagtgtcttgagaacaaacagacttttctttggtgttagttaaaaacatcttttctttctgcttattcagggctcaagaaggaagagctaacctctggaagttcaaggaaagcttgtgatacagccacaaaaccgccctggctgccactgtgagaaaacgctctgcatgtctgcttccctgaatggaggacaaagccattctgttgacagacagttatttcatttcagatgatttttcaaatagaaatcatctatctctcttccatccgtcagtctatcatgtatcttttatcatctatcagctattatttattattgatcataatctacactctactatctattaatttacctattatctatttatcatctatatctgtggttctcaaccttcctaatgttgtgaccttttaatacagttcctcatgttgtggtgaccccccagccataaaattattattaatattattgtttttgttttttcaagaccgggtttctttgtggctttggaggctatcctggaactagctcttgtagaccagactggtcttgatctcacagagatctgcctgcctctgcctcctgagtgctgggattaaaggcatgtgccaccaccgcccagccataaggttatttttgttactacttaataactgtatttttgctattgttatgtattctaatataaatatctaatagcagaatatctgatatgtgatccttctgaaagagtcattcaaccccaaaaggatctcaacctacaggttgagaactgctaatctatattttatcatctatcaattatctatctctctataatgtatcatctatctgtcacttatcatctatcgtctattttcatctatctatcatctcttgctgtgaaataactcttctctacactgtgaaaaattgctctcattgttaataaatagctgattgactgatagcaggattttgggaacagagagaatgctggaaacaggaagggcagaatctgaggagtctcgagccagacatggaagaaacaccataggaagttcatagatcagttaaacgagccttggggcaatacatagattaatagaaatgggttagtaagaactaactggatacaagcctaagctatcagctgagaatttataatgaatattaaatatctttgggagtgacattgggggacagagaaaaactccacctacaaacggcacccaaatgtctgacagctatatccacataagacctgagaaagctttaaaaggttcggaacacacacaaacacccaaatgctgcctcctagtttcatgcctcttatgccagccacgttatgtctcccagttgttacctgtaggcttgagctgccagcatgagcacatccagagtaagccccaccagcatgctgagaactaagccaaatggcaggtttaagttttgctcatatagggcagggcgtaggtggcacacacctttaatcccagcacttgggaggcagaggcaggcggatctctgtgagttcaaggccagcctggtctccagagtgagtgccaggataggctccaagctacacagagaaaccatgtctcaaaaaaacaaagagagagagagagagagagagagagagagagatcaaacaaacttacttttggaacaaagagaacatcttcaacaaatggtgctggcataactggatgcaaacatgtagaagactacagatagatctaagcctttcgtcctgcacaaaacttaagtcaaaatggatcaaagacctcaacataaacccagccacactgaacctattagaagataaagtgggagatacccttgaattaattggtacaggagactgcttcctgaacataacaccagtagcacagacactgagatcaacaattaataaatgggacctcctgaaactgagaagcttctgtaaggcaaactgaggagcttctgcaaggcaaaggacacagtcagcaagacaaaacggcagctcacagactgtgaaaagatattcaccaactccacatctgacagagggctgatccccaaaatatacaaagaactcaagaagctattnnnnnnnnnnnnnnnnnnnnnnnnnnnnnnnnnnnnnnnnnnnnnnnnnnnnnnnnnnnnnnnnnnnnnnnnnnnnnnnnnnnnnnnnnnnnnnnnnnnnnnnnnnnnnnnnnnnnnnnnnnnnnnnnnnnnnnnnnnnnnnnnnnnnnnnnnnnnnnnnnnnnnnnnnnnnnnnnnnnnnnnnnnnnnnnnnnnnnnnnnnnnnnnnnnnnnnnnnnnnnnnnnnnnnnnnnnnnnnnnnnnnnnnnnnnnnnnnnnnnnnnnnnnnnnnnnnnnnnnnnnnnnnnnnnnnnnnnnnnnnnnnnnnnnnnnnnnnnnnnnnnnnnnnnnnnnnnnnnnnnnnnnnnnnnnnnnnnnnnnnnnnnnnnngcatatacccaaaagaagcacattcatacaacaaggacatctgttcaacaatgttcatagcagcactatttgtaatagccagaaactggaagcagcctacatgcccctctaccaaagaatgggtagagaaaatgtggtacatttacacaatggagtactactcagcagaaaaaaaaaaaaaacattggaaagttgaaattgtaggaaaatggatggaactctaagaaaccattctgagcaaggtaacccaatcacaaaaagacaatcatgatatgtactcactcatatgtggattttagacatagagtaaagaattaccagcatacaatccacactgccagagaagttagtaaataaggaggaccctaaaagagacaaacattgtcccctggagaaggggaaagggtcaagatcccctgagcaatttgagagcatgggaagagaggggagggagctacaagaatgagaagggaagaagaggaaagatgcagaggtcatgaggaagcagaaaggttgagtcaggtgaagaatagaagaaaggatatgtgataggtagggttttagttgggggttggtaggggaggatgggagggagaagggaactgggattgtcatgtaattcaatcttgtttctaattcaaatgaaaaaatgattaaaaaaagctttgctcatgtagacagaaaaagattacagatacacagtaaagaaaggtctaaatgggggggaccttcaaaatagggtacagtgtgtttaaaatgtacatagtcttgggagagaaaagagaaatggtgtagacagtcataaaaatatttttaaaaaataaagtctttaaagaaagaataaagtaatataaaggaaaaaagcaacacaaagattaaaaatacatggggagtcagggtcctgtatgtttttgtattgtctttattttttcccgcttactgatgaaggaacgacagctgccaagacacattggattataaaaactgctggattaaaccagcctatatatttttaaaatgttttgactccaaaatgaaagtcagaaggtatgttactttggggaagaggttatgctttaatttccacaggaggtgagaggatgtgaatacattacaggttaatatggatcaggtttgatcaagaaaggccccctgaaaattatgtctacagacataaagaaataaacctgaaagaactacaagacacatgatgtatattttacctgctcaaacatcaaacaaactatcatctttggctgacttatgtgcaatgaacagtctatacttgtattaatgcaggtatgaatgttacctttataagtttatgtatttacagagcaagggtaccagacaccaataaaatagatagctcaggtgatccagcatgaaaacatcttcaaggctgctgactgagatgacccagcctctcagaatactccagccaagacttaaaaaattatcctgattttctcaaggtttccccaataaacacctagtggcttctgaactgtatgcacttgttcatgtgttttctgatctgtattacttttcttaccttagttttagaactggtcactcttcccttcacttcaatttgttgagtgtgtggatgggtgtgcctgagtgtacagacacacacacacacacacacacacacacacacacacacacacacacggctggctgttttcaggtatcataataattgtgaagaaaatgaaatggccatgaagaggtgtgaactactctgactgctttatactaaatagtctggggacactttgtctggtaaagtgagatttgatctgagttatgatagtggcaatcaaaacagagagttggaggaagagcagagaactgcaaatgtatgggtgatggaaaagcagcactggccatttggccaagagaaagaaagccagggtagctgaagcagagcgtgagaaggaacattgcataggttgggtcagagttttgtggaccatatagagaccctccgatttcagtctgtatcatatgtccaagacagcgtccttgactgaatagaggcatctcatagtaagagttgcattataatccttttgtgcataattaattcaatgtacttctgttcaggagtattcatctgtctatacaaggcatttcccacagcaagatgaggaagttacagcttgctgtcagtgatgtcatggatggcatgggagatggacctatgctattacactgaaaatactctaacagtgtttcagacacaacttcagacatctgtgtttctctgcaatagccataaatcaggacattattcaacacctctgattccttctagagtctttcacatcactagccctctgctactgtggcaaagtacctgaaagagtcaacctataaaaaggatggctttgcttttgttctcagtttcaaagtttcagcctttcgttctgtgctgggcacatgaccaatgacctacttccttcagtgatagcccacctcttagacatcccaccatctccccacagcaccgccagcaaagggtcaagcctccaacacaggagcctctggggggatgttccagatttcaaagagtaaatctaccatgtatccttgtgctcgcagtcctgccctcttttggagcgttctcattaccgtgtagcagccttctcaaaacccaaatgcaagtaactcactcaaatatgtgtatctcaggttacagtataccaggggcccttgcaagggtttgtgaaataccagtaaataaatatcacttgccagactaaaatcctctaatagctgcatgaagtcccaggacatagtataaactcatcaacttgtactgcaaacttccaaggataatagtataaagggaacctgaataccatttgtcaggttataaatcaaggtctccaatgttccctccacccttccccgcctgaaagctttgacaaatgtaactgcaagagcctggctcaggtttccagattcctcagaatcccagtgccctggtgctctgacccctggagttcttgtgcaatctcatttctctttactccactctgcaggaggccttgttctccaacagacagactcctcagccctcacgtccaacctccatctactctccctgaaacagccacctgttggtcagctcttgggtgtacacagttcccaaggttcacaggcagcatggttccagattcgaagcctactgtacaaaagacattatctccagatgggcatttcctctggattctggtaaactcttcttcagaccatggtgaggaacactcttgaagaatagtcctagagagttctgggaagtgtgcatcccagaattaactccctgttatacttacctgagagcagttctgaaaaccttcttccacagggttcttagcccttgactacactatgcaagctcagttccaggaagtttgtctgtcgtatccctggtatccctcatgctttactgttgctgttatctttgctgagcaaccttccacatacaccccacagctttacctaatctgtttttttttttttaagtttcaagctaaatgtccctttctgtggaatgattttcctgtagaagcttggtgtgatggaaatatgtcctcaaattctttgacattcctgtggagaagtggtcctttaaatctgagtgggtttgtgactcaaaagaaagcaatggatgtgacaccaaatgactctgggtcaggtcatcaaaggacactcatcttctatttttcttgctggaattccttcttttgcagccttgaacttgtaaataagaagccccgctgctttgagccttctatgacaacaagtcggcatctcgatcaatagtgacgtgtcatctcagtattccagcagtctctatgaaggcagagacaagtgagtggggcagtctgggatcctacatgccactgcatgtctaggatgtagcgtatcttgatttgtaagcctctttgctgagtaaggagctctaggactcttacgggcatggtgattgataggactcacaggtggctgttgtgtttctaagagttccaggagcattgcctcagaatggtccaaagtccaggattgaaaacagctaatcttaaagtatgagtgactgtggatctttgttgaaattaattccataaatcatcacacaaaaaactaatatggggccagaaagatggctcagcaggtgaaagtgcttgctgccaagtatctgggatccacatggtggaaggagatagccaattcctttaagttgttctctgatctctacacttgtactgtagcatgcccccattctaaatattaaataaaaagataacaaagaaactatactctcatcagaatatggtgccctaaaattgctttgtttactcctaatgcttggtacagcagttattaagtggtagcacttttagaaggggatcaaatcatgaggatgggaaatggctatcatagacaagactgcggccttatcaaagggcttgatggaatatgtttgctcctctttgttttcctgtgtgtgtgtgtgtgtgtgtgtgtgtgtgtgtgtgtgtgtgtgtgtgtgtgtgtgtctgtaacagcaagacaccattctgaaagagatgagtctttgcctgacatggaacctgtcatcgctgtaatcctagacagtcatgttgtttcttaatcttctgctctcagatattttgttaaagcagaacaaatgaacctaaacagaaacccatgaagcttttaagtgaattctctgtgtgaatgaaacaatatagaaacagtacagggggcaagacagcacctcaaaattcccatgagtgggacacacagtgagagatgtgtttggctgcagacacaggctaggttgattcagaggggaggaccaagaacctggactgttgagtctcgggcatgattaaaccttagttaaggaagtccgtgatcccagctgagctgaagtgctatgaattggtgaacatgcaccttctcaagaatgtctgtgtgcatgcctttccccttccatcccatcactgtctcttcggcatttggggggatgcagacagaaaaaagttatttcaatttataggccctcaggatcagagcagtggtacccaaggaagtggacctgatgagactacacttgatcttaccaaaaatgccaagaaacgatgacctgaccagacttaatgacttctgagtcagttttggtggtgagactctaggccttaggcctaaatctgataaccataatagtgaaggcatttagaaaggaatttggtgtatatcatatattaaataattgacgatactggagatggctatgtaagttttatttattatttattattcctctatcaagaaatgaggcatacatctatctcctcttcttagacctggaaatatttacatctgctttggctaacaaaacctgatgatccccagggagccaagggaaaagatagggaagctgccatgcatcttatagataaattagtccccagagcttccaagatgagccagtgacccctcttgtcactacatggaaggaaagcattctctggctggctgttgtccaaattattggtccacaaatgaatggaatataaccaaatggttattgtattaagacactaaatttttggtaatttgttacccagaaataaattgctggttagcactcaaagctgaccttaagaatccctgtctctgtgtgtctgtggaacattgtcctcccacacttcagtgtaattatttcctaagaatgaggtggtgctccacaccaagaacaaaggcttgcagagcaggtaccccatttgttatcctctttgtttcctgctcctatccaagaagctgccctgactcactgaacagaaggctggggtagggccacttcctgtgtgctttgtttgcttctgtgctcccagcaagctaagtcaggtccttcagtttccatagtgtgctgtggcctgtcctgactgcagacattcataggaggggcattctccaaaataagaaacaggtccagggtagtcagttcctctagaaatacacatgggtttaagactaaagtgggtaattactgtgcagaaacatgttttgagttttgcctctcccagaacctttgaaaaatagaacataatgtgtagccaaacccctagaactcctgggcttgtagatctcaaataatcccatccagattcacttactttcatgcatttctagtttcaagattttttttccagtttgaaaaacaactccttgagagaattgctcttcttgagcggtagcctgcttcatactcccagagctctatagttacctcagaaattacaggtactgaccctcaatcttctagtctagaaaatacacacttgaaatgtatgatgagtctacatactgagaaaccctggggtaatcctggcttcagtcccagccctgccactagccagttgtgtgactcccagcaagtgctgagtctttctgagtccatttccacaaaagcatacatgaaaaacagtgtcccattcccaggtcattgcaagtactagatgaactagtgcatgccaaaccttcagccatgttgtttatgctaaaactgttagtgaatttatgatccctagtagttactttatgaaattcctccttcctttgctctttgtgtgtgtgtttgtgtgtgtggtagggtgtacatatacatgtgtgtgcctctgtgtagaggccagaagccagaagccaatgaattgttctccacatgattttctgagacaggcttgttcactgaacttggtgctcacactctccagtcagcaacctccgggagcctcccgactctgcctttccagtactaggattactgattcaagtcaccacaactggctttataaaatgtgggttctgggcatcaaactcgggctctcatgcttgcacaacatgtgcttaccaactgaaccatctatctccctggccccatttgctccctcagtagaaagttaaccgacatgacacctcctgaacactgtatgactcttctaaaacattgaacttgacaccattgtcctggaaacacattactttcttgctttagattctaaaatctagagtaaagcaccaaactagaacttggcatgtgagggaaatgacactaaagaagaaaagggggaaacatccccatttctctgtagctcatgatctaccccattttcctgagctcactgtctggaccagtggttgtcaacctgtgggtcacaaccactttgggggtccgatgacactttcacaggtttatctaagactactggcaaacacagatttttacattacaattcctgctagtataaaaattatagttataaagtaacaatgaaaatgttatggttgggggtcagcccaacttgaggaactatattaaaggatgcagtatttagaaggctgagaaccactgctgtagacactgtcaggtcctgatatctgtagtcatatgattttgttttctgaattgcaagtaaggacccatggtctcacaaatgcaagagttctctctctctctccctttccctctccctctccctctccctctccctctccctctccctctccctaggtgacatgactcaaaattttaaattgagattgcaccagaaaaaaagtgtaggacatatgttgaccatgcccagagttctcaaagccagatgctgcctggctccaagaggagaaaaccaaaacaatcagaaatctcctcttttgccaaaacaaatgctgcgtctctccagtgttattcctgtagatatcttcgtttggattgggcctggtccctgtttccactctgctgcagttctgagatgagagaaagctaacaccccatgttcactctggttagcaacaaattcctctctgggtgaactttaggagttttggggttcctttctcgtctttctcccacacagggagtcttcaactgtactttccctctgactcttaatgactatcaatgctatcaacaacaataaaaccttgttaccaattttagggcgtttatcaggaacttgcttttaaatatatttacctctcctagtggacttagtagtaattgttattatcttatagttaaatgcctcctacttagagatgttcaattcatggacttggtaagtggtggagtaagttagatatagttttctgagtcactcattctcatcagcccctgtttttttttttcccataaattgtcttggagacatgagatgtatagtcagctaacctacacagatcgactacctgttagaatgagttaaaatgtctaatgtttaatgtctcacccagtcctcatagaaataagaatttttcttagaattatctaatttttaattcatgggccaagaatcaatgttgttgttgctgctgttgatgatgatgatattaaggctcaaaaccctttctaggtctcagtagatcttctgttagaattctgaatggacttgtgcagaaactcaaatatcaggaggagggaacaaagtaaatagaaagataataatatcttcctctgcagagtccaaacttcaattttggatgagtatgtgtcagatgctgtgacaaccatgtaaggcaaaccaccaaaggaacaaggttgctgtccatggggtccttcttcataaatccataaatttaccagtgaaattagcactctcattacccagtcacctctcataagagctctcccgtggggactgaaccttttggtgggggcaaacaaagagagcagaaagggagggaaactaaggaaggactcttagctgtgggttcagtgccattaattctcagcactgtgcgaagcttatctcagacattctcaatgaccttcactttagtcaagagtgttgattccagcaagcatcaagtcactgacttgagttttatggaaaaagatgaaaacacagagcagaaccaaaaggtggtggtggaggattaaaaaggtaagttttagaaaggttaaagccaatttcatttctgagaaacagaacacctattgttaaatgactactgtggctaaaataggaaaaatataaaaaactaaaatatgaatttatggatatctggagagacagcacagtggttaagagcacttggtgcagccatggggaccagagttcagaacccagtactcttgtgacttcaaatctaatgtgggcagagacagaaggacattagagattgttggcttccagactgagaaaatgggagtccccaaattcagagagagactccttcaaagggtaagccaagatagaggaggacacgggaaacttctgctccctgtatatgtagtcataggtaccccacacaagtaaatacatcttttattaaaatattaattttcagctcagttttttagagaccccacatctcctctaactatatggattcccaagcccatttaaattgatatgggcaagcagtaactcttgcttgtctacttggaccttaggtcttaaatcccaaacattctcaacagcgtctagttatagattatgtgcactcaccacgagtgcatgggatacacagaaaacctgacgggtcaggatgaggttcttctaccaccccactctcctgacattgatattgtcagtttttctatctttaattctctcattagatgataaagtgcattttttaaactcaaagtacaccttaacttttcccctatgttatcagtgtctgagggagcacacaggttttaaatgtcctttgaattgcatctacatacttggagtatgtatcagcaagtggtggtgtgtgtttagactgatttcaagttgtcaacagcacaacatgtagtctgcatgatagtcagccattccatggtacttgcttcttttagcataccttttgctcagtatttcttgtcttttcttttaagggacacggtaatggcaggtacatgttaccttgtggtaccatcttatacttacctaaggttataatctacttctgttttaatgaagatgtcagatttgtctctctcccctatgaaatagagcatagaaaagtgatgattgataaaaataacatatgagatttctgagtctgctacacttacaaaataaacaatttataaaccttggatatttacttgtgatagtaatttgttgcaagaataacacatagttataaaatcactgtttagctgagcctggtaagaaccctcagatttctgagtgagtttgacatccatttcttgcttaagattccctctctctctttctctctctctctctctctctctctctctctctctctctctctcgactcacaggtggctgttgtgtttctaagagttccaggagcattgcctcagaatggtccaaagtccaggattgaaaacagctaatcttaaagtatgagtgactgtggatctttgttgaaattaattccataaatcatcacacaaaaaactaatatggggccagaaagatggctcagcaggtgaaagtgcttgctgccaagtattaaactatagatggaaatagtcttcattttgaaaaggaagtagaataaccactggggatgacagaataagtcatcgccacccctgtgcaggattctgatgctgtttgtgtgactcagccttcccaatgccccaaagctctgagtcaccacagtaatgctgaggagatattgatgaactttttattttctcagatgagtagttcagctgcctagtttcttatctttgagttatgaaggccacaatggacattttacttaggttacatgcaacctaagaacacgtaagagtgggtgactgagatacccaactacgagttgacatgatctgcagagaaagtatactgtctgaagtacatacaggctgggagtgtcacatcaggggggtaccattgtgtaggtgtgatcaactgacaaatcatcccatctttatgagtcttaatgttgcttctcaagataatcatactcagatgatatttacctgtctggagattttacagcctcctttggttggtgctttttgaccacaataacagtattaagaccagaactctttttaagggaattaattttattgattaagtaaattgttcaaataccaagcttggatgctgccagctaagggaatgaagagaactagagacatccacagtgctgggcctggctcttcatcttctgcctggccttttcttctcgtaagacaccattccttaccttagatgccttttgtccattaccttagtttcctttcctttgtgctcttgctggcagttggactacagcctctcaggccagccttgtaacagtggcagaagcttgagggatggaagcagagtccagaaacagctatgaatgcttcctcatgttcatctctttctccatttttaaacagtgcaagatcaccttcccaggaaatagtctaacccacaaccaagctggatcatcctacttcaggtcagtcaagataattcccgacagacatgctcaggggccctcccaggtccaaatggattgacaattaatattgatcatcatatccgtgtgtgtgtgtgtgtgtgtgtgtgtgtgtgtgtgtgtgtgtgtatgtgtgttttttttttgtagaattagaagatagttttccaaaaccaaaaaagatggtgacattggctaacaccctcagggcctcaggctgctctgaggaatctgagagacccagagatttctaagggagatgcagtgggggaatgggtctgcagagcacacagtagctcgagaacaacttaaaaaaatggctggtcttatgggaagacacttttaaaatagtttcataggtttttaaaaacagatggtagagcaggcagcatatactgcagagtggaactggtgagtctcaagcagtaggagccctgtagtggacaaaagaacatgctgttaatgagtgggttgggttcttgggccaccagctttctgctgctcaccctgcttgcagggaggagagtgcggaagcatgatggtcatgtcaaagctgccagcagggtgtctggagcagagagcagggtggtatatagcagccctgagctcttgccagtcctccagacatgctgcccaaccacaaggattctgcacaacaagatatctgagatgaagaatggtttattttctggattaagtcttctcaaaagacttccgtggtctgcgctgctgcaggaggccttgctggtgtctgtgtgccatgctgcccccttgggccatattgatgtccatgatccatgctgtcactggcaactatgttgatgtccaccaaagccatgctgaagtccatgatctgtgttgttgccggatgctatgggcttggaagtgtcttttacagtgatattgaagactgcaggctcattactgagagggagagacattgaaagcctctgtgacaaacactgccccacaaaacaagaaacccacaggggtcatggttcacaggttgagaactcctggcctttgccaaggaagctgtacctataaaatcttaactaaatggtttcctaaacaaaaccagagcaatagtgacacagctggcacacccatgatgatgggagaaatctcatcagcaccatcccttgatgctactggaaaccaatggctgctgagggagggagattcagtcttctctaaagatggcctctgataggttatctaatctgagtggtcagccctaaccacatgaacatatgaccaacactgaacgaactcagcaggttgtatttacatatacatgtgtacacatgagctcttgtgcatgcttgtgtatatttgtgtgtgtgtgtgcctgtatgtgtgtgtgtaaaataataataattaaagaagaatggctcattcatctaagaaggaattagggaaacatgagaggagttatatgggggacagagaagggtggaaattatgtgaatacagtacttctttatgaaattctcaaaaattaaattaagaaatttaagagacaaaagaagtttccctcagaaatatttattccaacagacttctcagagctggcccctatttccgaggaattactgagggagagactatcgaggttgaagctggagaggataaaagaatagagctatggatataatgcacacatcagcatgtataaatgctatgaggtggtgcattaatattaacataagaatgtgtctgcacatacacaagacactttcctggtggccgtccatctcttcctcaccaccccatctggaacccagggtcacagatagaagccagagatccttcttttgacttgggaaagcaaaatctgggtgtattcagctttgcctggccagtttccatggccacatagcagggctnnnnnnnnnnnnnnnnnncaccccctggcactcagcagacggttaccttccactgcagaaaactgcagactgtaggctaacaggaaacatacatgcaagcattcgaaccaagcttcttattaagtgatcacagtgccggttagtattcatttgaataatttgcctggtcgtctgtgggctgtgtatgtggaatcagattttccttgcatgtcacattgttataaagttcccagcttgccacaaaaatctgtttaccacaggaaccaggcaggtttctgctgaactttggtttggagaggagatgagattctccgtctgcagggtcaaaccattgaagcacccgagtgcaaaagaacaaatagcccaggttcctttgtgaaattcatcaaaacactaggtgactaaaaagcagttaccttgaaatgcagcatagccacagttagagagaactacctagcaacggctcacagtgaaaaagtatactacaataagcaagcatgacaccaatttctgctggtcacagcataggctgtgacatgagaagtcatggttgacccacaatcttctggggtcagtgtcaaggaaaccaggtgtgacaaactgcatacccagcaactggcttctgctttcaattctgcactaatattatttattttcttagtatttctttggacaaaggctaaatgcatatatatttgtatatgcagattatatgtaggtgtacttatagacatccagatgaaacacaagctactgttaatcccaaagatgagaggagaaaaaccactaacccaaatcatcatggccaaattaattaaagcaagcctttttattcatgtacatgagctgtgtcccgcctaaaagtgaggttcaagagatctgcattggatgtgaggaagacaaggtttttatagctctgggatagggggcttccaaatgggagatttgacaagcaaaataggcagggttacaggagcaaaacaggcatagcaagttaatcataacaacctcctgaaacaaaaacatgtttgcaaaggtggtcataacaagtgtagtcatagcaaccttttgcaagatggccattacacctttttgaaacaaagacataattgttgtttcctggaatgggtagtacaaagccttttaaattaaggttacagatgggacatagttcaatctttgagaaacaggaataaacctggtttgtctttgctataagattgcttttaagcctaaaatggagacaggctccttcatcatagaaaaccccacctgaatcagagtaaagtccaagcgtttctctctgtctctgtctctatctcccccacttctctgtctctctctacccctttgaaatagtatctcattgttccaagttggagtcaaactccctctatagccaaggatgagcttgagcttctggtctatctgtgtccacctctgtagtgctgggattacagaaatgaaccactatatccagtttgtggagtactggggagtgcaaccgaggactttatggatgccaggcaagtactcagccaaccgaactccacccatggccgttccattttccttgtaagaggatttgtaaatgagtcctttcaagccctaatctgatgtgtccccatttgtgttcacagcctgtctaggggttctggggtttctctcatcccgtaggagtcaaacttctagctatttctgctaccattggaattctggcctagggattccatttgacttcattccttcctcacttccttcatcctcccccttttcccatcctccccttttccctttttcagacagacacatttcctgttctccaggaaggctacatctgcctttcactttgcatgtatctttctttgctctatttcatcaggaaaaggaatttacagcgtcattctgacttgaggctttggccttgcccttcaagacaccctgtgcctttgcttggaaagtgctgctctgctcccttgcagcctcttctcttctcttctcttctcttctcttctcttctcttctcttctcttctcttctcttctcatctgatggatagagtttgctgccctccctgatgagatccacacagcccagtccacagcagcaccttcttctccctgtctagtggaagcaggagagagaagaagaaaagggatgagtttgcatatttttcttcattgatttatatcattttcaagcaatctgtattttctttgctcatactatcaagaaatctttttaaatttactttagaattctgccagaatttctctagtctgtatctcctgagatctttctctgtcttttgaatgttaggacagtgtgtgcttgtaaacttttaaagctttgtttattcttattattgaaaccatagccttcaaccacggacaggaaattgagggagagctaaaatgattatgaatggtcctcagagcagcacagatcagaaagatccacatggcacactcctttaatcccaggactcaggaggcagaagcaggcagatctctgagttagaggtcagcctggtctacagagcgagttccaggacagccaggacttcacataaaagtcctgtctcaaaacaacaacaacaacaacacccaaacaaacaaacaaacaaacaaaaaaacaagaaaaccaaccaaccaaccagccaaaagaataaaaatcaaggactcaacctcaggacaccttatggatttttataaagtatatattgttatatttaacatatcaaagccaatgctggctgcctggctttccctgtactggttacagactcctggctcctcttagcactttttgccagccccctcctaaccctctgcttcccttcccccagcttctgggacatggcccagctgaccaatcacctcacacgaagaaaagacaagtgatggacagggaaaccaatgatcctcaaaatccctttgtagatactttttgctaaaagaggccacttttgtgtacaaacccagaaattcaaggtagctgagagtcttagtcataccagaagcagaactgctagcctaaattctctacttcaaatggtaagagtaaggcccagaagtcagaggaacagcaacgcataagactgggacttgggaggacacacaaaaatacactgaaatctccaattacatgtctaatgtgtgcttttgagttgctttgagtcagggcaaagatggaagcagtcctttggaatccagagaaatgataaagagcagctcctgggctagaggcacagcagtgcttggcgtgtgtgagagtctacatttgattcctatctcccccaaaataagataaagtaaaataaaaataaggaagcaaaataaaataaccaaaagtaaaaatctaagacccatacaccatagggacagaaaacatgtttgggggctgtctggctctgctagcaaattggttagctgttaattgtttctttaagggagctgcatgatgggaaaatccctaaggttttatcttcatcttccaaatcttctaaatctccaaatcaaaaccattaacaatgaaccatgtgtcttgatagagtggagccatttgccaaggaggaatcacacaatgctctttccttcctggactggccacacgtgaccaggaagaagcagagctgggattagccagggtggccctggggttgccctccactgcatgtgagagttcctgtctgtttgtgtgggacatgtggtgattcctgcatattcccttaccatgagaacagaaaggaatcttcctgattcagttttcctatctatatcaaacaaactctttagaagggaagattgatcaataaattgccgtttagtggtgagttaaggtctacaaggcatcatatctggccttgccctaaaagaatgcttgcagcctagatagccccaaacagacacaggaaaagggaagacagtaactgaatttttccccttgtagaaaagagagtcctttctttgatgttgtacacgcactaagggaaggcatgtctggtgactgagacattgtgggccatccagcatcattctacctctcttcctttgtgaaatcacccttgttttataggaattctgttccatcctgtggctgaagagtgaccaaatccttttcaccagccctagggttgggttgttgtgggccaacatcctccatacccatgactagagtactctgtaaacagatgctcatgacatacacgtaaggttcctcagtcttcccaaggcctcttcactgctgcttgtggttaatctattcttaaacatcaggagaaactgaactgaggagctatggtttgtaactgaaatttcacaactcacactcggtttcaggtaaagggagtatttcttaaccttcaatcttgaccaagaaaggatcagacccttctaagttccctgacccggtagtgatcaattcctgcacagctgcatctaccaaaaggagactccaaacctcatctagtacagtgggaactctagattcctggagggtgtcaagtccaaacaacactccatgtggcagaggaagagccccctaagtcttttggagtgaggaacagtagatgggggagtttgggggtcaacagtagatggtatgctatgctataagagtaagatcttactcattccccaaggttccattaaaactttaggcaaactcatcttgtaaagcagaagctgaataaaattgatgggaaatggctttgctaaaattttaaaccttttatttcttttgagataaagattcatgagccaaatgctctgagtatcggtgggtaaccttgaacttttgcttttcctgcctcagagttgtgattgaaaacatgccaccacttccagctagttgcaactgcttcttggagtcttggttgtttaacttgcctcttctggcctagtttgtctctaggttcagtcgtcattgtttaaccctctttccactgggcgttaaaccatcttcatgttctaggtgggaaatgcatgttggcattactaccctcatgtaaactgatggagattattgctgtttttttttgttgttgttgtgaggcatctgaataaaaacatgtaattcctgaaacaacttagattttgagaggtgggacatttccttctgttgctcttataaaatactagtgatcatgcctatggcttgtgaagttttatgggaagccacgacaagaagctgcagtatggaaggatgcttattaaacctgcatacattatgtatgactatgcccttgttttgacctcctcccctggaaccctcccaatcctgattacaccaggctgagccgtgaagctcagaaaactgtaaagccctttaattggggcattaggagtttcaaaataccagttcaggaaagcttctcaaggctttatgtttctcaaaatatataagccaagttcttgtaccagtgccatgtttctctaccctgagaagatggatgcacagtcaacactgtgtgtgtcaggcaggcagcctgtcaaaaccagggatggtacacacattttataaaaatgcaaggaacaagcaaaactagggaaatagtaaatggtagagttgaactccccattgggctttaaactacagactctgaatttcctggaattagagaagaagatggaagtcccataggaagaacaggtgcttttaaaagacacatttaaaattcttacaaccagctggtttggagttctggaaggagccttggtctttcatcctggtggaaggtgtgtttgcctttgagtggaacagggatgaagagctacatgccatctctgagagctgaaagctcccatttgatgagaggggatggcttacatcagccatggcacagcagtgtgggggtggggttaggtggctgaaccacccacatctcctaatcaatcaccttgatcagtctgatagtcaccccttgccctctgagatcccctgagagatgatgcagccatgttgggagtataggaaggttgcaccccagcttgttgtacataaacacactcccgcccttggctaatgggacatttagtttgggggtttgaataccaaaattagacactagcttcaaatccctaaaaatacaatttagaaaaatgagctttggctttgctgcctatctccaaagtgtaactgagctatttcctaaatccatatctaccctgtaatcattatctagttaaactttcctatgtagcttttattttgttctataaattagttagccaaaaggacccttgaagaaatgcattttatcatctggtttttcagtatgaattaccaaaaatgcctggcacggtgcatggtggtcaggagaggaatgagtcagtccagaccttcccagagtttggaagcaaaagccacaagtgtacacccaaaaactaggattctagttaaaaatgattgatgattagctcctcttttccctcaaatcctgctaaaagtatggttggaggagatgaatgcacaaacacagaaggagaagacacaagcaaacgcttacactcttggaataaagaaaacagagccatgctagtgggacagcccagcagttgaagcacttgctgcgtgggaaatagaactagagattcctaggacccagtaaaaatgccacctgtaattccaaccacggaaggcagacacggggatccgtggaacaagctggccgtggagactaacaatatagagttctggctttcactgagagactttgcttcaatgaataaagtaggaaaggaagaggaaggtgcatggcctgcctaagcatacagatggacacctgcacatgcacctgaaaacacacacacacacacacacacacacacacacacacacacacacacacaccatctcagggccagaagggaatgaagaagttgttaggagcacgccatgggaatgtggtggaaacactgggcaggactgttttaaatttgtgaccaccagccactacttttaaattttcagtactttctttcacccttggggagaagctaattacaacacctctttcacccttggggagaagctaattacaacaccaaatgcatcccttgccttccaagactaaaggagcaggggtgggtggggaactcaggggactcctttccatggaaggtatcagctccatttgtgcccaaactcagggtaaagtgagctggcgccttccacagtccatctgttctgttagcagcaggcttcaaaataaaaataaaaaataaaaggcttctttagagtgtaaaatagtaaggccaagccaggtggcgggggcagccctgctgttcacatctttcccaaacctgggccaaagttgccaaaagcaacaggaagggagttttccccccaagaatttacaaaccacataaaccaccccaaattccctttggtgtgccccagctacccagcattttccaagaaggcatctctgtgtgtttggcatctaaacaaagactctcagctacaggggaagaaggtaaggccctgcccctgtctgctaaagagggattaaagacctgtggtttcatttttgagtttttccttctgaccccaaccataacatttgagaatgttcagttgtgcaacaagggctagtgagtaggtggagtttccatttctgcttttttttttgataattcaatgggaaacagattaaatattcatgtctccccccagtctctatggaggccaaaaaccatcaggctgcacatagagattgtggtaacttttcaagagaagtagagcagatagaatcctaggttcaaactgacatcaggagctaaatttttattaagatatttttccaatttcatatccattgctggcaatttgtgaaattcggagacatgtaaggtggatagatgggtgctggatgctgattgacagggtatgtacgacagggatgggaaaaaggtcagatggtttatcagccttctaagcagggaagtctattagagtgtagaccccaagatactggggtaaagtttaattgattatttggaacacttaagcttgtagccaggtctagaagagaatgggcaaggaaggctaaggcttaggagaggctcagaattggaagcctgcctcaggcatacgcagagaaaaccacaagggtgcatgtgacagccagggctgacatgaagggaaggaagagagtagagagaagtgggaattcacggagaagaggagatgggacgtccagagaagtcgcatgagaactggaagagaaatgagaagatgatgccagtgagcacagatgcttcaagatccgtggttgtgaaagggagagcagcatgacggggtgtgtgcaggaagcagatccaagagagaagatgaaaaatcctgcatggagccatcacaacaagcattcaaagctgtgcaaagggatcctacggcactgggctcggcctcttcttcatgctcctttgttgaagaagcattgcttcttaaaaaacatttttactttttctttgacggtttcatacatgtagacagtgtgtcttgatcatgtgtccctgtcacttccccactattcacctacccagcacatcttattcccaccttttttataacttatgaggccaatttgtgtccatatgctcatgggtttggaatcttccaccatagtaccggcagcacatcagcagccacagtcccaagaaaaatgactccttccacagagaccatcagctgctaatagtgcctcacctggtgatggagcctcataagcacttttatccatgtagcagtgctgactggcttgatcttacacaggtcttgtacaggtaactacagtagctgtgagttcatgagcatcacggctgtgtcatcttcagaagaaagtatttcacagcaattctccccgtgactccctgacattctttctgtcctttcttctacgatgtttcccatgtactggggctgggagtaatccatgcagatgccccatttaggactaagcatgcaatagccactcattttcaccatttgagcagttgtgagtctccacatcaacctctgcctgctgcaaaaggaagcttctctgactagggtgagaggatgctaagttttgaacataagcatgaatgtttagaaggaagtctgacagcggaggagactggactgtctaaagtgaacacggcattctctcagcaatcatgcagcttggcattgccgcacacaggcagggtttggcttcttttagtcatgtgactagtaactgtcagtgggctctccatgctgctcagctgccatgcttctgtgactgtcctgtgacaacctgccagccccttctcctctgtcctcactttcagctggagaccttcatgagtcaccaagaaaacagttgtaaaataatccccgctttcctgcaaatgacagacttcattcttcttgatggctgaaaaagaagattctattgtatatacaaaccacattttctttagccattggttgggcacctaggtaggtacattggtttcttagctctggcaaatggtgctgctgacatggatggactaatgtttgttaacttagaggttttagatgaagaaaaacatgttgaaagactcattcagtctcagaaagacaaatattgcatgttacttttatctgtggatcctggtttttatagatacaacaactcacatatgttctgtgatgaagtagaagcaaaactggggacacgaaggactaataggaggggaatggagaaaaagagagtcatggagtagtagaggagggatactcacaaagcacattatatactcccatgaaaattgccttgcatggcccttttgtttttaaagacctcttggggctggagggatggctccagttaaaaacacctcttgttcttgtagagaatcatgtgctcacgcatgcactcactcatacacacacacacacacacacacacagacacacacacacagacatacacacacagagacacacacacacacacatgcacaggagtctcacaggagcccactctcctgagtttacttggtcgttcttctgacttaacctaatgtcttatattaccagatgagaagcttgaactaggatggagttccgtggtagagtactgtttatcttgaaggatgctcaggtctgttcctcagctctgcaaagccaacaaacaagaaagaatgtggaattcaccaacaccctgaagttcacttctgaacatgggttttgtcttttgtacccaattctttctcaaggtactcactttcttcatatcatttcttctaaggtatttttattacattttaaaatatatacgtctgagagagagagtatacatgtcacatgtgcttgaaacttttgggttctttccttccactgtaacttgggtcatcaggcttcaaggcatgtgcctttaccccctgcgccatctggctggttcatcatacctatgaaaacaagggtgagaatgtttccctcaaagttctccagtgcatctaaactctatataagtcacttagagtcaacaggcacacagttccaatggatcttttagctacttctcccatcggcaaggaagttgcaaatcatttgtgtgtatttactgtgacccatgccagagataccaatacagacaggtacttaggggccacaagtctcactgcaagccttaggatagaggacaaagaaaccccaaactatccaggaatatgaaatcacaaggagaaatcagagagcagaaacattagatcatagcgggatctgagtagagtggtaaacatgcttccagaccccagtgggccatcctggaaaggcaatctgggaagagtggctctcatagcacaagcctcgtgaaacacttgtgaagagaagggtggttaaaacatctgggtcctcggggagggtaagccttgatgggctcccagtatctgtggtgagtttggaatgacagagcaatgctccagtctgatgctaagcccgcctgggcacattgtggactggtaaggaagccactgtccttggctttccccttcagaaacttgcttttattatttatttttcactctcagtttccccagactctggcttataaatcacctcattctctgacagactggtgggacaggctttgctgcattctggaagtttggcaatcccacgtttccagtctccacaacgtacaaaaggtgagtcttgcctgccgaagagtcagagcccagagtttgtcagcagcctcttgggaggtgccattctaaagtgtctggctgaccctgtcctaaatctatcagactgtgaaaataatgggcagaaagttaccattcttgagaacttcccccaaggccactcacttggaataaactgggttatctaaaaggtagtgttgactctcatgctggtagacctggaccttggaataggctcccttcttttaacaccaacccttattagctacttgcctgtcgctgtgagaaaacaccatgaccaaggcaacttatgggaagtttatttgggcttatggttccagagggacaagactccatcctgttttatccaaatagcctgtcaggaaagaaagtgatttataagccagaaactgagcgaactaagcagggaaaaataaataagtaaaagaaagcctggggcagggggagctaagagtaatttgctttctacacaggcccatggtgctctgagacaggcttagcaaacagactggctgtcatatggcccactccaacgtcactgcagaggttggtaacatatcaaggggaagtatggcagctggaggtaggcatggtggtgtaagcaggatactagagtaacctttaaccatggagcagggagagcaaaggggtagtcagtgaaacctttattctcaaagctcagttccgtacttcctccagcaagggtgcaccatcacagcctccccagactgtaccaagtattcaagtaactggggacaaagtattcagatcattatgccttctgaatcatgatgcctgatgggaaagtcttggtaaggagggacaaggcacctcacactcagctaattgggacttcaaaatgttaatcatcaccaaaccatagcaaaaggggaagaatgtgaatcagtgctctcaaacacttctagaagactttgcattttaatatctttctaaaagacattcacactctgtgagaaagacttggcatgctctttgagaaagctgggcagaaaatcaggtcacagaccttgtggtgtgactttgttaagagttgatattaatccacacaggcatgcacggcctgtagggtctgggacacattgctatcagagactgtgtctcccttgcttcttcacagatagcaaccagcaaacagtttctccagatactaatggaatctaccaagatgcactactacaggtgatgtttccaagcaaactcatgagaagtcttggtgtgcgtgtgtgtgtgtgtgtgtgtgtgtgtgtgtgtgtgtatacatgtgtgtgcatgggtgtatgtgtgtgtacatgtgtgcatgtatatgtgtgagtgtgtctgtgagtatgtatatgtgtgtcttagtgtatatatgtgtgtatgtatgcatgggtttatgtgtgtgtgcatgtgtgtatgcatgggtgtgtgtgcatgtgtgactgtgcgtgtctctgcgtgagtatgtgtgtgtttgtgagtgtgtgtgtatgtatgtctctgtgtctgtgtagaaagctaaattgttacccattggatctgacagaaaagaatgtctactgttctgccaagaggcatgcttgaaaatgtcaaagtatacatttaatttcctgggtggatactgagatggtggttggggtgggactacattccagaggaaggagcagcctgcagaggcctgaatatgaggtggagtcaagctccttcatctggtctagcatggtgtagcatggaaactgttggtgacagagctagagatgatactcacagtcacacagtcaaaatgagcaatctagaagttactcctgtttgctcatggcaatagctaactccctttctgctatccctttgccccttttccattcccctgtgaaatctttgacataaccatgacagctgcccaatgtccatggtcctttcttttagtagcagaaactcatttctcactcacatactttggggtttatatgaagtgagagcctctctctccattccccaaactagggatagacttgtgacccagaaccagccagtgtgaccatagcatttcctggccactatgttcaggaatgtatttaaaacagtctgtattaagtcctacacaatactggaagtctgactgtattaatggagaaatgactccagaaatcacaacaccattatttcactggggttgataaaagaaaagtgtgagcctagagctgttaattactttgcccttttcagcattagaagaatgagcctgagaacacacctgcattcagaacagcacaactgtgagaaggagaaagataaaccacacactcagaggagtccaatcttgctgtgtctgaagctacttcacttcttgtttgtcactagcatgaagtgataaatccactttccaactaaatacatgctactcacagatgaagtggctttgaaaccttagttccaggccaaccctggccccttaagcctctgtaccttagagcgtctgttacctggacttgacccaagaactggagacttaagaaaaatctatgtgtataaggagagcagttactcaaataggaaatatcggacttccatggctccagacacctttgactactttgatttcctgcctgaatctttcttttaatccatgtttgctgggatattttggcatccaataatagatgaagcagggtggcttcaatggtctttgtgtatctatatggtcaccttgggtctaggcatcttctttaacttgcctattctgatttccttgccctgcttaaaacaccattgtacctgttagaatatgggagattgggccctatcgggactcatgcttacatggcaccataaaagaaaaccatagctcttggccaattaaaattagccataatctggtaccatccagccactgccatactgatagggaaagtccttctgtgtatatgtttgtcttattggttgataaataaagcactcttggccaatagggaagcaagataggtggcactaggattcccaggattctgggaaatgtagtaaagagcagagttgccatgtgatcccgtgaagagagaatgcatgccactggcatcctcgataagataagtctttataaaatatatagattaatggttatggttgctaccaggacagagctagcaaatgagaaatcctagtcattggccagcagcattgtaactaatataaaactctgtgtgttgtttgggggccttagtgtggtggtgggccttggggtggctggcagaaagagttattgttacaccatataagctgagccctcattgtgaaatatcagccaggtaggactgccttcatttgcatggcaggaatttcatggtggaaatcctaacccaaatggatggccctgaaacaaaagctgcccatcgtatcaggcaggaagctcccattactgcctgtcagccttcctgtagtgtgtatgaaaaacttagccttttttttactctgctctgatgcaaggccacaatacccgcctttgcagacttctttacactgtatgatgtgttggacttcaacaacagtttactaagctggtcctgccagtccactacaatctggtttctgcctgcacctccagggtgcaaacgtagctccatccacagaaaccaccctctatgtcctgatgagcttactcccctccatcacttcacttctgctacagacccttcctttgtccagaatgtcttcctaacagatgaaaaccacctcacccagcaatgcttctcagacaatgtcagcttctttttgaacacatgaagaatgtctgggtgataggtaccaacttaccatcttgttttgactatttgtttgtctaaacaagccagtggttctcaacctgtgggttgtgaccccttggggaaggtgtcaaatgatctttttacagggatcagataacaactatcctgtacatcagatattgccattatgatttataacagtagcaaaattatagttatgaaatggcaatgaaaataattttatggttgggggtcaccactgtatgaaagggtctcagcattaggaaggttgagaaccaccaacacagggtctcatgctatagctcagactggtctagaactcactatgtagctcctgctggtctcaacatcaatgatcttcctgccccttgagtgctggggtcataggttcgagccaacatgcccatctggatatgtgttttctttttatatctttccatccctagctagatttcatccaaacctcctacacagaagtggtcctcaacagttgttaatattttcttttcattctaactaatcatttctcattgataatcctgaaattctaagtaaatttaaaaggagatcctgattccccagccctacagccccccaaagcttcacagcttgcattcagttctgtcttctactttggttttgaaattagaaacatatgttgatttgcaagacagccattttttccttgttattttcttcccccacttctggacaaacctttaaaacctcactaagtatgtcaagaagcagcaatgaaaatgtcaagaaattataatactcctttctgaaacacacacacacacacacacacacacacaaacacacattcacatacacagacacacataaacacacactcactgacacattcgtacacacatatacacaatcacacacactcacatatacacacacagcactgctggtatatttacaaagatctaagttgagaaaacaagggctaattttagatttggatttttccctcaagtcataaaaaaaaacaaaaacacaaacattaactgaaaccccagtgcacaaaacctcttagtcatagccgccaggcactttcaaaaaccaattttctagagaaaagattctgattcacagctcatgaagtcatgagttctgcccccctgatgaatagaagtgattgaaatgccaccactagggtctagttttacaagggaccatcagaagtgggagctgggcctgatctgctattttccagctcatttcctaccttgatgacatcctacaatgtgaaagggtccttctctgaccccaacaagaagacagtgatgagcagacagtgatgggagtgttgagctttcacagacagacatgacaatcttaggacatcccataatcatcacagcaatcagaaaactgtgtggtgaaattttgacctcatttgggaaattccccccaacagtgctgatatggtgtccatggctgacaccactcagactttctaaacagagttgatgatacctcaggtctcagagcagaccacagagtgggccagggaggcagtttcttcttggctctcttgctttctgtggaaggagttcctgtcctctgagatactggggtcaccttcagagtgtcttcaggatggacatctgttggctctgggcctctatcttctcttttcttcacttctttgtgaataccagtctttgtcttggggcaaggcaaacagatgactgaggagatgtctgttcctcctgtggtctttgctgtttacatcgtcactagaataagctgtttctctctttttttgaaactgtggtcactggggcttgatgatgagacatctccattatgggacaagccatgagtcaaaagcacttccaaatctcagattctttgtgagcctctcattgactttagtcctctggaaacccctcctctcagcctgtagaaatggattgattctgcctatatttgttatttactatgaacttgtttaattcccaggcttggaaaaacaggctcactgggacatcattggaaagctacaagcttaaattagaaaggagacaatgaagaagggtgcaaggctgtggatgagtaggttgtgtctgtccttggcaaggcctcctggcttttaaacaccccttcatcaaatctctctaaagcctgtttggcaatcacagcttcccagagctatccagtggaatttaaccatgatttaatctgcagaacttgcaattgcccgtcacacttgaccctcctctgccctcaaggcttatggatctctcagtgttttgggattagaattgatttggttcctaaaataactccagagtattccctaatggcatgtgtgcgcagatcaggaataaaccttcttactttcaggctgtcaccctgtttaacagtggtttatgaacccagcccagatagtctcccagtaggatttttatgataggaaaaactggggtggggggaatttcttaaggttaggtataacccctgcggtgcctaaaaacttaaaatggagatttcagtcttgttctggtaagtgattttgttttctttacatttctttctttcttttttggctaagtgtgattctggtttctcacgcacctgtatggattctgggcctaccaactacatgctatatggttttcagaaagtagctgtccatagcatcttcatctataggagcaatacattaacacgacttcttatcttgaggtgtgtgtgtgtgtgtgtgtgtgtgtgtgtgtgtgtgtgtgtgtgaaatgatttcatgtgtgtgcacacatgtatgtgtgtagaggccagagggcaatgtcaggtttcttcctcagtggctttctacaacagtttttgatacaaagactctcacagaacctggatcttgcacatgtagctagacgactggtcaacaggtcaaggaatctgcctatgtccactttgttggctctgagatttcagacatatatctacagccataccttgcttttactgggttctggggatctgaacaagtacttagctgactgactgagccattgtccttgccatcatctggagttttgaacgaggattaatgcaagtagtacatttgttacattatctagtatattttaactatgcaattccgtcttttcaaaatctgtttgtacaaaaactctttgttttacttgcagtgattaatttatacactttttagatgggactctggatagcaaacacaaacctagttcctttgctgtggtgacacagtgtctttaggttgggcaaatggtaacttcagtgagtctctagagcaaccttatttatcacagcatgttaggttttgtttggtgttttgttgtaaatattcacaagaattgagctcatccaattataggaaacatttcccagctgagagacacttaatcatgacttacaaagaggcagctccaagtaatgctgcctgcgattgaaataggcttgtttgacctgactgactacagcagcaacagggaaggggtgtgaagagaaattggggagagctgtgttgttctggccatgtggtatggattggatggggatgagaggtactcttgcttggtgtatttatgaatggacaaagcagggaaggtcagatacaggtagatacaggtccagcattgcctctacatgaaaagagaccagagtctctacagcagaacatacatgtatgcattgcatcaaatctcagacactggtatttcctctaaggagaccacctatcactgcaggggctcccagcacagagtggtgtgtgagatgggaatagggcattagggcttctgttgcatttgtgtgaatgaaatcaccaaaagtttgtgcacaaaagcagctccatatttaagctcaaattgcattttttatgtttctaggaagagcctataacaggagtcttgttttattaatgaaatgatgtttgccagcccaaggaataaattagtgatttccaaaagatggtctgggccatctgtatgctcatttattctacaagatagtaaagtgtgaggttaaaaaaaaaatcccagaaatcatttctgtgtcaggtatttggacttccttgttgacagtaacagaagacagagcatgggtgagacagtttttcgtgattgcttcctttccctgaacttgaagtgactcatcatacagacttacaaggtcagctcctgcaactagtgctcagtgtttactgaatttgtagaaagggccttgttagtcatgctctcaacttgcagccacttgtccttgcatggtttgaagaggggcgctttaatggagaatgttacagacattcttcctaccagcctggtcccagagctgcatcagccccaaataaacacttgagacttatattaattatggaattgttggctactgactagggcttcttattggctatctctgtcataattattaacccatttctatcaatctatgtattgccacgaggctttagcttacccagtaatgcccagcatggtattactcctccatcatcctacatgtcaactgactctgcctacatttctcagaatcctccttgtctcctagtcccatctatcatcctgccccattggccactttattcatcaaccaataagttccaataaggagaacttgcattttaaaggcaagaatttagattaaaaaaataacttggtcaccaacacacaaagtggaaggaggtaggactttccagttcccaagtggaaacacagcaaactaggagactaggagtgagagcacccccccccctttataagtaactgtcctgaccttcaggacatcaacctggggcaagagagtcagggatagggaatggggacaagagacacaaaacaggattctgatcaagtggcaaactttactttttcctcaggctagcttatgtagtcggcagagcaggatatggggaggggtagaataggttgtttgtgagccaggtgttagtgtaggcaggatattaggaagacacaaagaggatgtttggcaggataaagagtaagaggcccaggaagggttgcttaggtgactgagcctgtgggtggaggactgggttaagttgtttcttttcttgagcttaggttctaaggagctgctatgtaaaggttaactatgtggcctgccaagcatggcctaggatctcatgccaagccctgagatttggctcccaacaagtaactgccaaatgaccagaatgtttggtccttttcaccaaagctgcccccattttccacactctcttgatttttcagctataaaatgaacaaatcctgaagaactaacatgtaagcatagtaaatattattagcagtcagatgcttgaaatttactcagagagtaagccatatgtgtacacatgaacacatagacacatacatacatacatacatacatacatacatacacacatacacacagacaacgcttacacatatacacatgcgcgcacacacacacatacacacatatagacacacacaggcacatacctacagacacacatacagatacacacacatacagacacatacacatagacacagacacagacacagacacacagatatagacataacacatatagatacacacatgcatatacatacagacacacacacagacacatttatcagataggtactcatacatgagagtgatatatgagttaataagcttgctggcgatgaccattttcacactgctaccaagacactaatatttgataatttgttagcaaaaatcacatcaagtaacttatgaaattttattggctatttctatattattaaagctggggggcaataatgcttctaaaaataggtaacaaaggccatctttggggaaagaagaaaggcattcactatgatttctctgggccctttaggaaacatagaggtgttcctttggccatatacgtgtgaatctaaagaagggtgaggtggacatgaaggggataggcactgttcaaaaagtaatgtctgtaagtgttgccatggaagccaagagaagggcaccttggtccagctgaagcgccaacatgctgcacacagagaagcacacttgtgagagctaatggaaggagtctgagctgctggagcccattccttatgaatcatagcttaatgtacaaaaagaaaccaagaacagagacagaaaaaaaaaacacagctggcttctttaaacttaaaaatagaatacaatgagcatagctgctaaatgtcatgtctcaagctgatccttcctggattgccagactctgtgatgttggttctccattcactcgctgtttggtatgggaaatgaagtttaatcctttgtgggctctgaccccctggtggacattagggtgtaccacccagattcctctacatgaccaaaccactctgactactgttgagggtgcttctggctgagacagccaacatccatttgggcgtcccctatgctcagtggagccatctggcccaaagatacaagtctttccagggcttttcacatccaatgactggtccaagaggaaatataaaggttgagcatcctggttaaaagatagaagaaccaacattctggagcaaaactgactcgtctcccagcttcagtatccctcttggggcagccagatcctccaaagagactaaacccaagtcaacctctccctctgccctgtccattctggtcttctcttccacaagctttgatcccaataccaatggttatgaaagaccttttacatgcctgctgtctatttaggttgctgtaacaaagcacatgaggccagacagcttataaactacagacatttgtttctcaccattctgaccaacaggcttagagacttggcatttgtgttttaaagctggccatgttctagcaatatcctcatgcagtagaagcagcaaggcagcccactcatgagtgttccacctttacatctaatcacctcccaaggttcccattcccgatctgccacaatgattattagggcgtggcacacaaatactggacagacacaaacattcagacacagcatgcctcctccatcctgaccctgtttcccaggaacttctgactcctcttctgtgttgtcaggggaacattaactaaaggaaggccttggtgatgctcatctgcccaccctgaccctggccctgggtttacataagcataccccactgattcatggaaggttccatctcatcagagaatttgggcttcaatgtgattgttttcttcaaattgtatgaatgagtccattagtcatggagaaatttttttcctagagagtgatatgtcccagaaattttatgctggcactccaaataccacatatattctccagaaatatttgttagaccccccactgaattaagaatgacagggtttgtttttgtaagggcacagaaaatatagttataattgattgctttattgatttattcgttcatcatttcagtcactcattcattcaacaaataaaatttgggtgtctattaacagaataggcactgggaaccaagaacatggtctctttagttaacattgcagacaaggggaaacagaaaataaatacaaacacaagagagtgtcaattaatgatcaatgccgtaagataatgaaagaaagtaatgtgatagaaaatgattgcatacaagaatgttgtgaagggagggaccatatggacatccaaaatgaaaatctaggacatagtggaatgaagacctgcatgtgggcagtaggaagcgcaaggcctaaagtggaaacaaactcacagagggaaaaaggaaaaaaaaagccaaatactctgtgtgcctgaagtatagtaagaatgtgggcaaaagatgaggtcagcgaaggggacccagtaaacttctggtaaagattttatttttattttaaaatatgatgtgtttttgtaatgcatgcatagatgtgtgtgcacatgagtatagtgtcctcaggggccagaagaggtcaccagaactcctggagcaggtgttacagtgctgtgtgctgtgaaatgaactccaggatacgatcttaatttccgatccacctccacaggcctgcagtggacatgtcagagtacggcaagtctggcaagaaactggactttagttgaaagactttaggtaagcccccaaacgtcatcagcagaggaacatctccattccacacatttcaaaaagatagcatccttgaaaaatgcatggtaaagaggctagcatttatctcagcaatcagccagggttaagaaagggggtgcttgaaccgtggtggggactggaaagatgtgggtggcttgggatgataacagggatcctgaagagggggcaaggtagtggtttggatggatgtgatacttgaaagggttaaaagaaaaccagagttattccccaaggtttccatcctgtgcctgctgttgggtgggttcaggtgctatttcctgagagagtgaggccctgtttgagaattcctataaatgatggatgtgttttgccttgagcagtcactggctcttcctgacagcaggactgtcagagacacgcctgcagttttctgtcttctatgagcctcacctgctagccctggggtattgtgtatactggggagagcctttctgtgttcttgcaacatccctcctgaaatttgccatgcttggctgtttcaggacactctattataaatgagtagctaaaggcaaagcgtaattagggacaaaggcagcgaggcatgcaaagctggcatcaccgtgaggtctgtatccccagctaggtgccaattctgcactgcactgttacattgccacaggggcaccgccttctgaacatgcacccggatggttggagtggtctggaggagggggtacaggtcatagttactccaccatgaggctgcttttcaggcattggtagagaaacaaattaactggcataaccaggttcatgcatttcttctaaggacagcagaaagcacatggatgactaagagtgacgttcagagccctctgtatttattaacataaaggcattttatcaaatgggattctctatctttactgtggaaaatttctgatggttttcatggatgctatagcgctgcttagaaggctttgtgtttgggccacagtgactgagtctctccatctccttgggttttcatcccacagtgggacgttcatgcaaaaatgaaggaaggagaaagaagagacgctgacggttgcctgaagtcttcaatgaaaagcagcaaaggctggatctccacaccttcccccatgcagcaagcctttcctgccggggtaggagatgtggagaggttgaagccagggacagcacgcagaggggggcacagagtcatggaggctagtcaaaaagagaagccatggggagcagtggaacccctactgggccctgtgtgagtggggatcaagcttttatgtgacacaggcttgaaaacttgaggcttttgtttttcagttaaagtctcactggccctagtgtgcagttcaaagacagccatgagatgtctgagttttcggctgcagagaactgcctcaaagagaaccatgccacttcccagtgcagctcaatgctgcaaaagattggtcatctctgctcattttgagggctgttggatgggggatttgacttaagctttgactggagattcacagcatatcatggcccttctatactaatgggagtcaggcaatgtggagttctagttaaaaatatacttcccagggggatctgtgagctcagcgacatacccagtaaataactcctcagttttagagtgggtaactgaaatcatcgtacttatatccttggcttatagtataaggtatatatatcttatactatataagtataagtataagattatatatatatacatatatatatatacatatatatatatatatccctctgaaaccacccccaagttagtaagttcaatcagcatcccatctcctgggacatgccaagggccactaccactcataaggacctacaggtcactgaggcagtggcagtgattaggttacagagcaatttactcctgtatagaccaggtagatcctggagaagaaatgatttccttggtatatccaactcactaggggcacaagtagtaactcaaactttagctgtgattgcagatgtatgctgtagccagagagtatagctaaaactttttagccataatgtgctaacagggatctgagaggtgtgttgttttccattccaattagaatggagtatcagaatgactgagtttgtgtagagacgaccacactatgtgattggagtctgcatggttttctcacacggtagtgatcactctcctgctataacatattcattaggcagatgtatggcctgactgtccatgtaggacgattggtggaatggtctaatactgctcacacagaacaacatggcacctgatttgctcagggacttgtaaggtgtgagctgtagagaagataagccttatgaagattcagaaaaactgtcactttgtaattttggggggtttggggtcagacccactgaagtactagatccctggtttgaaaggcccagcttcatgagtaagccctctgcaaaactcctgatacaaccctacagctctgggatagtattttggcctggggaaaattgcactggagacttcaagaagggccagtagtggtatggccacacattctggccctcagagctgtgagtagcaccagtaacagggtgtgtgggatggctgatcccatgaattcttccatgccagagcagccttgcccaggactgaattttcctggaacccttaagaccacggctcagatttcctctggggagtaaagaaagctggaggactacccaccagcctcagttcctcactggctgctcagagttgcttctgaggccggggctctgtcccgtctacttttaagcaggtcaaatttctatggctgtaggcatactagccaagagacttgggaaactaaccatatgcctaggtggtctgcctgtgaacatcagtgaaggctgcaagggtatgctcagggattcaaaggtgccttttataccctcacaaaatcttgaaatcataataaatttttatctgagagagatgtgcagggaaaaaataagtgtctttcaactcctctggcctcttcctgttctcccacttcctggtgagtaagaggcctaattggttgaatgtgcaatttgatttaatcccagtctgactcagcaatgtccacagtattttcaaataccatgcacccttgtcagataacagcagtctctccctggcatcccaggcatccctgtaatggcagaaaacagcagacctccaatgcccagggcctctccctctcttcaccccctctgctggcatgtgaggctggggtggcttcagatgtctttctggcccaccccagggctgtctcaaggttgtttggctctttctgtggcccttgcagttgaaagattggctgggactgccactagccctctcaccatggcaacttttagtcaaagctcgaagaaatttttatctgcatctcctgttctcggtcaaaccattatcttgcctaaacttcattcccttcccactctcccagggaccaaaggaatctttgggtgcaggtatggcatttaactcatcactgtaccctgtcatctagtacagtctaacatgcaggccatggaaaactaattaacaaatggaacattaggagggtagacttccaagtcatctttgaagagctcacccatcctgtacaaaggactactccataggaaaaatgtcttcctagaatataaaagccgtctttgtgatgggtcccttgcctcccctctcctgacctcatgctgtgtatgactatacctgacagggacagaggtgtctctctaaagcagtcatgcctgtcctagaagactccttaactgtgttaaccatgttagtgctttgctttctgctggccaatgagctgcagagagagccaagagtactgggagaggagaacttggataccatagcaacaggatccatcagatcttagcctggtaccagtgcctcttcacctgtaatgtgggatggccacccacacctgccatcgggcttgtgtagttttgaagactaagtatacataatagcttagtcatgctggaaatttaaatagccaaattgaagacctgaattaagaacaggtgtggccttgtggctgacaggctggctgtataggcctaggaggctctgaaaaagtgctgagttcttcctcctggttctccactgcctgacacactgcacagagatcagtgtttgaatgctccaggagcattgccttcaaaagtctccgatctggcttggaagcccttttattatcagtgtagttggcatggttaccaacagctcatcttcatgaccaaccttgatactctggtgtgtgtgtgtgtgtgtgtgtgtgtgtgtgtgtgtgtgtgnnnnnnnnnnnnnnnnnnnnnnnnnnnnnnnnnnnnnnnnnnnnnnnnnnnnnnnnnnnnnnnnnnnnnnnnnnnnnnnnnnnnnnnnnnnnnnnnnnnnnnnnnnnnnnnnnnnnnnnnnnnnnnnnnnnnnnnnnnnnnnnnnnnnnnnnnnnnnnnnnnnnnnnnnnnnnnnnnnnnnnnnnnnnnnnnnnnnnnnnnnnnnnnnnnnnnnnnnnnnnnnnnnnnnnngagagagagagagagagagagagagagagagagagagagagagagagagagagagacagcagacagacagggtcccctgtagcccactgtagctcaggctggcctcaagctctctttatacatgaggataactctgaacttctgatcttcctacctctacctcctaagtgctgatattaccagtgtgcaccaagcccagtttacacagtgctggaaatggaatccaaggcaagcactctccctagcacagccacagacatcacagaggggaaagtcatgcagcagaactggagtcagggttcagggagcctgaacttggatctccatggtatcactttagttctagtgtcttcatttataaaatgttgaaaataaaaactacttcctcatgaggttgtgaattttccaggtaatgaaggtgaaaagttatttgtaaaatgtgaaagcttccctttcttatatgatagtctgtgatacattgtgtgtccagtaatgttctgtaagaatctgtggacattttcactatttataaaacatgaccatttggggagatgaaagaggaaagcaatgggataaatctgtagctggttaaccccaaatgtggtggctcactcttttaatcccagcacttgggaagctgagacaggaggattgcccaagcttttgaggctagctttgtctaaataggctgaaatccaagccagcctagtggggaatggggagagagagagagagagagagagagagagagagagagagagagagagagagagagagagagtaaaagctcagcaaatgtcctcaaagtataaatgggctgttttgaagcctataagagaataaaatggggctaaaagacatctgcttaactttatctgaaatctgtgcaaagtggagagattaagtaaacaagaatgacatgtttcttactggcataacatggtatttattgttgatacaataacatagtaaatttattctggtttgtctaaaagagaacatcttatcttctgtttagatgggcaagaatcagggtctgattttcagtgtctggctgatttgtccttgaggtttcccgaacaaatgctcccttactgaacacctggcagggtcccttgctaggaccaaagggtagcatgagaggctgaatcagagcgaactcagctcccaagtcagttcagacactgacaattaggcttgggggcagatgctggcctaccttctgaagacagacagccctcctaattctgttgttcattttattcttgcaatcttcttttgactctctggcccttccttgtttgatttaacattgtggtctccaaagctgggacatagaaaatgtcaggcttcaaattttagaaaaagtgggccttcggggaatgaaggaattgtgatatatatgggggacgtgccgttcacatgtacctgtgggtggttgctctttccatgcttggctttcaaagtctgtcttagccagagtagagatggttaattaagtaactgagcccactcatgtccaaagactgttttctcctcacttggatgggctcctgttcacactcctgaggtggaacttggggctctatagcctaggggaatcatggaaatgcataaagtatgagatacactgtccctcagtacatgttctctcctccatctaggaattgataccataccaccaaaagcacacataactgccttctattgaagtttgattctagctcagctaaggagctgtgctacattttacagagtccctatacccaggaacaaccatgtaatagggtgtgagtagaagccagtgcagacttggaacaggagagaaacatgcattctttggccatcgcttccttctgcaggaagacctaggcaaaaaggaatggaagagcagtggagagaaagggactttcagaagtgtctccttcaactacaccaaggttccttttcctctttttaagccattgacattttaacagaaagaagaacccagttccattgtgcttatgcaaaagccaatggagagcccagggcatcccccagaggcacatacactttgctggggggaagtcacaggagcagaagagagcaagctgtctctaccaaaggagagaagatacaaaagggaccatcatggccagggctgcaccacctgccttctcttgcacaattggtgaggtgtggtgaggactggtaaatgtcacttgggcatccttttatatgagccttttatgggtgtctttctctagagaagtcactgtaattgatctgtagtggtggcatctcaggcagcctcactttgcatgcgggttacagagaatgttgtctacacagctagccacagagctgaattcattctcgcttccctcttagaatgcaatagcatttccctgttcttgcaaaaggaaagaaagcagaaggttccaacactcataattagacatcaaacctgagtcttgttgctggcagggcacaggaaaagcacaaaagctcaagaaaatgtaacatttttacaggaaaatgtttctcactgttagcccttccccccatttgccttcactgcattgactagttaccacaatacattggctgctggttaaatctttgtgttgacagtgttctgagggttagcccagagcaatctgagagcagccccatcagcctttcacgaagatttgtttttccagtacaaacaacctcaaatgctcagcatcatagccctgttctccacccaagttatcaaatgcaagctcaaatctagagggaatggtagggttcaaagttttttcctctcttcccagtttatctctagatttggagtcagcagactaaaataaggtcccttactgactgctattttttttgcactgagtttaaaaaaaaaaaacaaaaaaatttcttttatattgaaaacttacatctcacagtaaattccagggacagcaaagggaagccccttcactctttaccattgttctcctcagctgtattttacataaatatattatatgtcagagctagagagctgctgttactgctactggtgtgtgtgggggggggagggaggttgtgtttaaacagatagttgtgtgtgatgaatttgtgtagcacatgcataagtgtagtttatttacatactacattcgtatagtttgtgtgcatgtgtgtgtatagtatgtattgagtatagattgtgtaaggtacttgcccgtgtatgtacatgtatagttgtgttatataatttgtcttttgtataaaagtggattatatgtggtgtgtgtgtatgtggtttgtattgagtataagttgtgtgtaatatatgtgtgtatatggtttatatgggtaatagattgtggtgtttgtgagtagtttgtattgactatagattgtgttatgtgtataaatggtttttatacagtttatattgaatacagtttgtggtgtgtaaagtttgtagtaagtataattttgtatggtgtgtagatagtttatatacatgttttatatattagtgtatgtagtttgtattgaatatagattaagtggtttgtattgagtgtaaattgtgtgtagtatatgtatagatagtttatatggataacagattgtggtgttttgagtagtttgtactgagtacagttttgtggtatgtatatatggtttttatacagtttgtattgaatatagattgtgtgtgtggaaaggtggttagtcctgtcattttttcacatatacaatcatatcatcactctgcagatcaagatataggtgtgtcacccccaaagcttttagggacccttgttaaagctatgcccattcacctcttttcaccatccctaaactcagacagtcacaaatgtaatctctttaagaatgctgtataaatggtagtacatgcctcagcaccatggaggatgaggcaggaggatgaggccaggctgggctacagaaagagtgcgaggccatctggagacataggaagaccttatctcaaaaacaaacaccaaggactggtaagattgctcagttgattaaggtgactgccaccatgcttcaactgcacgttgtcccaggacctccatgtgagtccagtggcttgcatgagcccatacatgtacatgtgtgtacacacccaacataagcaaatgtataaatgcaataaaaatcattaaaatggtgttgtatgaatgagatggctgaccatgtgcaaactacagttactgctgtgccaaggcttgagttggtaactttatttttattttcattttcctctgtttctcactcttctgggccttttttcctaacttcccatcaggcacttgacagacttcaggattccactttgactgacctactgcaactttctgatgtatttatatacctggctcatcaaaatctacaaatgggaacattttaccagtctgaataaattacagaaatcttacttgtttctaaatccctttctcctaactcacatatattgcaggtgctatggatattttctttgcatacattgacaaccatattggacactatgataaagtttagcaaacttgagaggaagaaatatctcgaacttgtacttttagatttttttccttcttcaaaatatttgagcagtctttaaaaaaaaaaaactttgcctttctttttcaataactccctttaatttaaatttagccatttactcagaaaggtctgttgtaacatattcccttcaatttcctttatctgggaaatatctgtttcatcttcatttttgaaacacaatttcactatgtataaatgaccaacactcctatcactgaaaacatctcatgtgacactgtccattgggaaatatgcacaaatgtgtattaaccacagagagggaaccaatggcaaagcaaagctaacttggtgaaccaatgagctttgtcagggttacttacaggagtataggtgagaggtcatttactggagcagaaatgactcaaagagagctgatcaccaaaagctcaggcaagcatgggtgacaggtcaccaaagctgggactctggaactcactatacaacttgtttacaggcaattcaacaggcagaagaattttcttccaggcagctctgttgacctttgtaatgtttcaggcagtctgtgtggcttctggctcttccagatgcttgtctaccctctgcctcttgtaggtatctcagctgatccttcacaggtctctttctttttcaagctatttggctagtttctgactcttctagacagctcagctaggcaggaagtatctctccccagcccttgctgtgtataaacactcaggaagggagggacctggtatatctggtcagtttcagggacttcctgaggcttctgagttggcttacttcctaaatcttaacagtatttccctgcaggatataatatatggaggaaatcgttacacaacttcattcctgtggtttctcatgaggatgcagtagcagacgatagaatgtgagcagcaagcaggtgaaccaaggagtatgtctagaacagatttttaaaattaggaggtgattatacaggccataaatagcaagagaggggaggtgggaggtgaactgtggagaagaagaggcaagctgaaaaaactatttagaagtgacagagagtaatggctgtttagaaatgacatcattgaaactcatgggatgtggagttggagaaccaatttaaaggcctgatactgtttacttgacacactgccttttgccaaagaggcttcccatctgagtctgtttccaaaatgagcaaatgattttttcgctttcctgggacttgactcttacagtttgtcacagaaagccatgtcatgggattgaggctgtctatctgctgttattatttttaattatgtatgtgtatgggaacatgcttgcagacgtgtgtgtgtgtgtggggggggagttaggtagtgctgagccacccaatgtgggtgctaggaaatgaacttgcatcctctgcaaaagtagcactcactattaactgctgagccatttctccagcccctgtctgtttattttaagtcaatttcccaatgtgcctctccaaaaagtagcatctctttgtctaactcatgtggaacttatctaacaggtggtggagtcagggctaaatgttgtgagactataaaaagatttctgtaactcttctgtgtttaagcatagataggctgaatataagtttttgttccagctagcctctgattgacagctaaagcttgccattaaattaatgctcataaatagtagacccatataaatagaatcatgcatttccctctttggcacctcttaaaaagatcaagaagatgtttgcaattccttcaaattttactaaacatgtgtacattgtgtctcagattctcttgtatagtatcactgagcaccatcacttcatgcaaatgacactgtgtactatcacttgcaaaccaggtgcagagctacaggagcaaacttccacttaacttcacatccagatgctaagttggtgctatgttttatgtctcttctctccctttaattccgtaataacaaaaattgccacaacccacttctcacttaacagacactgagctttaaaaagtgacagccattttggtgtctatgtcagaattaagtgactacagtgagagccacatggtgactgctgttctgaatgccatcttcactacttttccattaactgggacatcactgtaagttgtacaaacagcacagattcgtagtcacacctcgggagcattctggaatgccccgtatctccatccagtttcttccatgagtttgcttactcttccacttactaattcagcaatgaaaatggattagtcaccactttcgtcattatttctgttaggccacaggcatggcagctacatgtttatctattgacattacttgttttgggcagctgctgtatcttccctcctggcagcgggagacccatgagctcaaggagcttacagtgactactgaccatcacaaacaccgacattttcaaggatcttccctgcatagaatcacagcatttcccctgaaacaggaccaacaaaatgcatttaagatgggtaagttaaaatttcccctcttgaaaactggtttttaagaacatttttcaaatcacccgatgagcaaataaggagcttaattcattttcctgtctttcctggacataatgaatctgccactgccacggtcccaagccctctccatctgaagaaacaaagcaggcagcgagaaacaggttgcttttgtctgggtgatgtcatccaggtccagtgagcgatctgctgtctgccagttctggttctctctgcactaagatgctgccttggttttctctctccacagggatgcagcagggctgggagggagatgggggagggtggctgccctcccactgacagttctaagagcacatgacagaagaaaaccaggctattactaaaactgatcagctcagaagcaatgcaatcaaagccttcaattacacctgggtgatttaatcagctccctgtcaaactcgggctggggctcctttgctactgtacaaatacagtaattaccacaccagcttgcaataagatatcatttcagtggattagaaaacacattctgtcctcaattaccaacagccaatttatagaccctgaaacaagcaatattttttaattgctgcctttgtgtcattatctcaaaattacttctcttatgaggcattgaatcatctcagcagtgttgggagtgagggcaggggggagatccaaaaccttgtgctctgttctttcagatgaaatagaagcatcaaccttgttccctgctgtgctagattttgaaataagaaaacaatcagaactccagagactctcagctatgcaaatgatcataaacaaagcccaggggtccagagcgaatggctgatgaggaaaccaggggtcacattattctgacctgtgactttctgttcttctagccagattccccatcatatccctatcttctaagcttcctcttgtggaggaaggcctttatttcctttgagggtgtgctttagtttgtgccagatatggccactgtcatattccaatgtttggaagatttgaaatctctacccattgccttccaagcccaggtacccttccaaagagcaggagtgacttagctccactcagccatagcagggcacctagattcttcacttcctggtttcggggcacatcagatactccctgctgacttcctccaccctgccaggctactcagcttagagggatggtagagctagcttccacaggaagtacttttattttaccagacagcagagtacagaaaaaattattattgttagtatgacaaaccttccacagaatttacaacatcagattgtatttcacaaatactgtggcagtcagccatagtgtgtatcattgatctcacttactaagtgaggaactcaggcatagaatgactgaaggttctggaggtactgatgtcataggacattgaacaagactcaaagagaataggttttgatcctgacactggcactcagtagctaattagcatctttagtagcaatatttattgagagtgccatgaactttttcaacatttcacactagtgctacttttaatctacataatgactccattaggtaaaaactatagtaaccccaccgaataaagcataaagctgaaatggagaggagcaacttgtccagggtgacattgcaaggaaacagcacttctatgctcctgttcttagctaaccattgcctttgatttgggcacttctctcaggctatgacaaaatgcctgggagaagaaatggtttgacaatctagtcatggtggtgaaaccctgggtaagttcatggcagtggaagggtggggctagggcttctcacatcttgatgacaagaaagcaagaatgtggaattgatgtagcatctcctttttccatttttattcggtctgagactctagcccatggatggtcctacccacatccagggtggaccttccatcctcagttaaatgtctttgtaagtacctagacagatgattcgacatggtgagtccaatctagtcaagttgaaaactgagatgagccttaacgagccataacgagctttctccactctgtgctgcctctagttgtgttctcctgaatccctaatttcaagttatgttccactacttggacgatgtcctagaggtctcagaaactgtctcccatcttcaggacaccattatcttgacccaaacctatatatccttcaatatttctaatattctggaatgtatacctttaactgcttggttatctaagccaacatcccaggcataatcctgggtcaccatctctaacgtggagaattgccatggtcttctgatagaatgactgatgccagtcggatcatttttagaaacacacaattatctcaccaacaactccctgctcctgccttatcagtgaccatcattttatgtcttgggaggctctcaataatcttcatgataaactttgtttatagtaataatgctgccttctcttgtctttgtattgcccttcttggttttgtgccataccctactcccaccactggcagctgcattcttctctacaggctttgttgccttccttccagaggcatacagaggaagaactgtgataaactaactgagcattgcctcagttcctgttctgacttcagcactattcagccagggcttgaaagcatcagggagttcaagcattagagtctgactgaatgtgccataaacctggaaaggataatattgcttcatttggtcaaatcccccagtgttcaaagaagggaaggacacaaaaactgtatgaataaacacacggttgctcagtagtggtggcacacacctttaatgccagcacttgggaggcagaggcaggtagatctctatgagttcgaaactaggttggtctacagagctagttccagaacagtcaatgctgttccacagtgaaaccctgtctcgaaaaaccaaaccaaaccaaacaaaccaaacaacaacaaaacagcaggggtgagtgtggagctaagtcttttactctgtggggtttagagttcagtgttctgcttcaaggacaaatcttccccaggttaaggcatacatctgaatgcttttgttccatggagaaaatcatttcccatctggagtgcctcataggtcttaattggttatatagataatccagttgtcctcttccactgaacatctgtatgttgaaattgtgcaatatcaaataattttaacagagtcctttctcaaaggtacacttgtagataggtgacttaggtttgaagcttgacactggaggagtctgacaaaaatgaagttaagtggaccaggatgatccagataccaatgccaattcaaacgctcagtagctgctacaagtctattgggcaacataatttaaataattaagcctattaagttaattagtcaaacatttttaaaaattcaccatttgtttatacttccacatgctctcttgcttatttttcattcagaaagtgtcatgccagagagagagagagacagagggagagggagagggagagggagagagacagagaagagggagagggagagggagagagagagagagagagagaaagaggaaaaaagaaaaagaaaggaatctgcttgccccatatgtcagcactgtggcatgctgggaatatttagacagggtagatattaaattgtctcagcatggtcccccacaatcacaatcatatgaatctaggtccatatttcgggattatttacattaaaaatagtaccttgcttgttcagtcccaattcctagaatttaatctgtttgctggctgtatagacagccttgttcattccccattttcatgccaaaccaggttgttggctggaggaaaccacaccactccttcccctgggataatggactcagatttgccaccgtggcttctagccagttctgtgaaggttgcccttgagagtatgcctccctggagagaaagaacaaaagagtgaaaacaattagcactagatggactcaaaacttacccaatctttggagcctggcatacttgatttttgggggttcacaaagttttaccagattaaaacaaggaatgtcctgcagagtgtcccttctctagctgagaaaaccctcacagcagcgtcgtctaaaggtgatcgagtgggccagagaggcagcagcaccccagcccagaatcatcccagccttgtacatcagcagagcatgagcagggaaagttactggttttactttgttctttacccagagacaaagaacttataagcactctttggaagcttgttgagagataatttgctccaatttctccccctgtggatgggccatttcctctctcagtcataaagcgggaagaaagaacagattaatcagcccactcattctaaccttccacagtttcagagactgttgtttcaaagaaattttcctcaggctgtcacttttctgtcatttgaatgttaaccccttcatgacccacatcctgcgcttaggccaggctttgctcttcatcagtcaatggaaagcaacaggaccttctcccattcaggagccaggtggaaaagacccctggagcaaaggactgctgagtctttcagattgggcctggtcagtcactagaacagcggttctcaaccttcctaatgctacgaccctttagtgtagttccacatactccttctccctttgcttaattaatatatcattctccaggtctcagctgagccattgttttgttctcaaaatttgtggttagtgaacccccaaccataaaattattttcattgctacttcataactataattttgctattgttatgaatatctgattgtaaatagctgatatgcaggatatctgctatgcgacacactcctctgcaccctctcaagggatcaaggcccataggctgagaaaccactgcactacaggaagactgacgttacagagattgtacacacacacacacacacacacacacacacacacacacacacctgagctatctccccaatccagcttttcctcttgccttttaaataaacactttatgcatgtctgccatatgccaagcaccaaagataaaactataaacaaaagaatctttgccctcaagaatctcctaggaaaggagaaacgggttctggcttggagtggggattgggagaaattttgagaacaaaacaatggttcagctgagatctgatctgctaattcagcaaaaggagaaagggtttctagaagaggccactaactgtgcaaagaccctgtgggtgggtggacacagagtacccatcactgacccagaagcatggaggaactgtgggatggtccaagataaggctgtagaggctagacaagaactcaggccactcctgaaggtttcagtctttatattataattaaatgtaatagaaatagtatgtgttttgcctgataggaaaccactgaactattcaaactaaaatgtacattaaggcagtatgatctctaacttaccagccgacagaatgaactgtacattgtttactgttggttaaaatcctctgcccccatttccacccctaaccaccatctcgttcatgttccaattgccctgttgtggtgaatctgcacggtcagtttggctggacttagaataatggcggaaatatgcttctggctgtatctatgagtgtgtttccagaaaggtttagttgaagagaaaccttccctgaatatgggtgatgccatcctcttggcaggatctcaacagaatggaaggtctcagtgccaggttcatctctcctgtctcctggtgtggagtccatatgactggcttcctcatgcttctgttgccatgccttcctgccacaatggacggcacccttatggttatccagaataaaccttcctttcctcagttgctttttgtaggcattttgtcatgacaacaagaacagtagccaatatgccctaggtacagtagattccatcttctccatgttgctctctcaccttgcctcatgctgcctgggactccatatatttgattctatcagtccttcagtctgaaatgaacatgctgcatgctctgtgaaactggagtactgtccatccagacatgccctgtacagagccagagccatagttgatttttaataaacatgaatgagtgaatggatggatgttttacaattttgaatgtgatcccacccactccaggcactcattcctggttctccaagttggaacagtgttaggagccagtgcgtatgtaaggagccattggaagctgtgcgcatgcgcaatgggtaactttgtaactttcctgcccttagtctccacccctcccgtgacgtcatatggttcgatcagctgatgtcacatgttccgagggtttcagccggtcagaatgtaacacttctgaggcgacggttgccagcctatataaggaggggtttttgggcgttcagggtctccattttgtaagcttatccttttcctctcaagaggcattaaagctttactgcagaaggatcctgaggagtgtccccgtgtcgtttttgctggcgaggcggttagcgcgggacagaacaggttgatctttccttgctactatcctgggcgacgccttattctggttataacattggaattttccagtcccatctttaagaaaaggtgcaggaacacatacccagtatacccaactcaagtcaaggcttagaaggagccctttgccacctgccctgctgcctctactgcgtggcatcagtctttcttctctgctcctgctccctctggctctcaataagtgcatgccatgcagcaggaaggaggccttccttgagagcattgatgctgcactgggcttctccctctatttgctcccaagctgccaatcactgggatattgcagcctttctgtagctaccctacccacacatgtctaaaggcagtggtggcactgaaacgtggcatctgccatcattaacactgtgtcacactttgtaatcagctctgtaatatctatgcttggagtcaattgtgtcaagaaatgtctcctcaacagttgactctgttttttgattgctccttgcatgataccccaaactactcaaatcaaaccagagcaagaccctctccagcagcagcgctgaccaaattggctgagtgaaggtctgtcatctagcatagtttctgcaagctgctttgaaacagagcaatgtgagctaagaagagaaggctctgtgtggttctatccctggcaggcacatctgtgaccaaatcattatcagagcctaacagtagagtgatgacatacgcttttaagctatgactggtgcccacccacctgtgtccaggcaaggagcctcttccacactgttaagagttggagggattgcccagagtcttgctctatcatataggcatggggaaataggaactatgcaagcttcctgtcttcgctaagtaaatgtctatacccagcctggatctgtaacttgtttttctcaggtcaccctggatggcactaatcaaagttcccatcaaccaaaatagtgttaatttttagttctagttggagaggtttcactgctccaaaagtttccccaggcttgatgtgcctgtgctaggcatttatttcttaatgaagagacacatatgtggacacatgtgcacacacctaatatggaacgaaaatagacaaggctattgccttcttactctttcatgttctcccctgccatccatcacacactcacagggccagatagatctcttttagcacacctctaaacaagtggatacccgggggggacttgaattggggtgggagtggtgctcgtcagttcagacccacaccaaaggctatatgcattaatgtcttgtgtgtgtgtgtgtgtgtgtgtgtgtacagatattagctgaatcgagcattgtggtgaggtgacagctagaataactaagcatcttgtagatgtagatcagtatgaggatcttttggagccttggaagacacattccacagcaggagtccagatcgtgtcctggcagtgggcagatggtcagtcaacatcttttcctttgctttttcctttcttaactatttttatttcaagaatttgggattttttttccctatcagatttcttttcccttggggaaaatctgatagtaattcacagcttggtacaaacctacactgcccatgctctccttcttgacctaaaatttgcattcaatagcaaattaaaaattagagtgcattgtgttgtgttcgcaggattctaggaatcgggatgaaatgaaagggaagtgaagacttttcctccatagtctgcacccaggcacagacccgggcacccatgtgatggctatgtgttctatgtgagtatccacatgggaacaggccctgacagtagtgtgcaagagaattcaggctagcagcacgtggtgtccatcttccttctgaagctattaaaagcctggccatagcccttctcatcatggaaagaaatctagcggagcccttgccacctacccagtgccaagtggaaagaagcacaattcggagttattttattaatagttgggaagccaagataaggagtgatcacattacccctggctacaacatatttgaagagggggccttcctcccatcagctcaagcctggagttgttctcagagaaccttcatatcctctgaaagatatttggaaaaatttaaaagaaaaatcactatgctatccaccttctctggcatgcacctatgagaataaactggtctctctctctctctctctctctctctctctctctctctctctctgtgtgtgtgtgtgtgtgtgtgtgtgtgcggtgtatatgaatgtcaaggaactgatgctgttgaggttaaagagcaacttgcaaaatttgtttctcttttattcccttagtcccagggatcaaactcaggttaccaggcttggtggcaaatgcctttactggctgacctatctcaccagatgttcacaaggtctctcattggacctggaatgcactgatttggctaggctgcctggctaatgagctactgggatctgcctgtgtcctccctccccctgctccttagcacttacactagtaagcttatactagtaagtctggttttatctgggtgccagtgacacaaacttgggccctcatgcttgtgcagcaaacagtttactcactgatctgtcttcacgaccctgtcctatgttttatgcaagaaaatacctcattcactgtggctgttatgtgaaagtgtggcccccagtgggcacacatcatgatgaggccatcaaaaggagtagaaaagaaaacattagaaggtaaagaaccaggcaataacttgtccaccagaaataacaaagccttgagaggagtaagagggcagtgatgggatggggaacctgtgtccactttggagggaacttaaagactttttagctagtaagcaaatgaaagatgttccagttgctttacagctgttgctcagctttcacagacctcgggaagcccatgcatgctcttagctcagaatcaggtcgagttaattcttgagaactacactataaagtgtaacattctcagctcggggtgaacctgtagagagtgctggtctttctttgggcatgaacaagggaagccaggtagctacatctaagtttcctgagtcagagctgaggtgaaggcaggctcacctatcgttctgtgtttgctaccctcagtttgcaatacaagggactctgaaagttgttacaacagggttcacagatcgtcttggaaggtgaatgcgatttaaaagcaaatagctaatttcagacactagaaactggtgagacatcccatgttcatagattggtagaattcatattgaaaaaaaatgaacattctaccaaacgctatttacacattcaatgcaatcccaaccaaaattcctatctcactcttctcaaaaatagaaagaaaactatcctaaaatttgtatgttaccacaaaaactgagatagccaaagcaatcttgagtaaaaagaacaacactggagggatttcaactctggaacaatattgaagatccaagcaagcatgagtacatgtaactacagttatctatattcaacaaagatacaaaaaacataagctggagaaaagacatcttcaacaaatggtgctgggaaaactggatgtccacatgcagaagagtaaaattagatccacatctatcactttgcacaaaagctaactccaaatggatcaaaggcctaaaccttaaacccgaagcactgaatgtgccagaagaaaacataggcattaccccacatggtataggtgtaggaaaggacttcctggtaggactccatttgcccaggagttaaggccaacaattggcaagtgggacttcacaagactaaaaagcttctgcacagctaaagaaatcatcaactgagtgaagaggaagtacagagaccaggagagaatcttcaccttctatacatctcacacaatcaatgtccacaataataaagaactcaaaaatcaaatgacccattcaaaaagtgggcttgaggctttaatggggagttctcaaaaagaagaaataaaaatggccaagaaatatctcaaaaaaaaatatgtcaccatcatctctagcaattagggaaatgtaaatgcaaacagcattgagagttcaccttaccctgttaggatggtaaagagcaaccaaacagcaaacctggagaggatctagggaaagggagtcccatttgctgttggtggggatgtaaccacacagccattgtggaaaccagtgtggagaattctcacaaagctgaaactagatctatcatatgacccaactatactactttgtgtattttctcttatctatgggtcccggctccaagtctttaggtagaagtatagttctcatccctcaacaaagaactttctcattgcaacagacagaccatgttacgataaatctttccgccaaaagccgcctgagccccaccaccacgtgtgagctttatgccagccgcccgccggagttaggcccaaatgaatacccagaaacttgtattaggtacaaagctgcttggccaatgactaggattctcatctgttagttcagtctcaattatcatacatctatgtattttataagacttatcttatcgggcgccttattggcgtccctccttgctggtggatcacattgtgctgctggagcagttgtggaggggaaaagagggctcttcctatttctccttcgcttaaatatgagtctccttgctatgtcacttcctgcctggatcatcacttctctactacatttcccagaatcctctttaactcctagtccttgcttgccattggccaaactattttattcaacaatcaataagataaacatacacaaaagtacttcccccatcaagaccattatagaaaaccacaactaatcaaaaatgcagagactaaaagatcatgtggtgcccagttccaagtgatacatctacaactcaacttctacatcgaagactcgggtactgctgtggaagagaatagcgggaagattgtaagagcaaacggaacaggaagtctactgtacaagtgtgtctcctagaaatgtcagaggagctatatctatgaagtctcaccaatacggctgcctaagcaagagttgaacaaggatcacacaattcacatgctactgtggaaggagggaagctcatgaggcctcaaccctagacaaggaactacaggtaactaaggagtagggggaagagcctcaccagggaagagcctcctcagttcatgggctgcttgtatgtagcagttcccactatcaaatggtcagccctgagatgcagcatgcaagtaacgtatggaccgaacaggttgcatttgtatattcaggtgtcagaatgtgtgtgtgtgtgtgtgtgtgtgtgtgtgtgtgtgtgtgtgccataggatctgaaaacagaaataacaggacaaaaaagagagagagagaaacagagacagacagaaacagaaagagacaaaaaccaatgagtgaccatgaatttgagaggtgcaaggaagaggtatatgggaagaattggagggaagaaggggagagagaaactgataggattataatttcaaaaactaaaaaacccttatatacactagctcatttcctatgcactggaatgatttgcctctgaatggatttcccctgatcctttcccttggttctttcctcctggatcctttagccttctacactgaaccagcagaacattaactcatgaatcctccaatgaagatgataaaaggaaggagggaggaaagacactgaagagggacactggtcctgactcgccttgctcaccttgtggagatccacagacacccagtgaggggtgtggcaggagagagagacaagagttgtcagcacaagccacctacaagtgtcacaccacaggatccaattcaatgctggagaagcttgaagggagaaatcctgggagattccatgggatctgaagctgaccaaaaaaatactgacacttgtcttttcatcacctatgagatctgcacactggcagttctcagataggaaactgcacttagtgtttctttctttattttgttgtctgtgtcagtatcttgcctgcatgtttctggtgtctatggaggtcagagtttgggactggatctcctggaactggagttacagacagttataggccaccatgtgggtgctaggaattgaacccatgtcctcagcaggagcaacaaatgctcttaactgctgacccatctcttctgttacttagtgtttcttaacaagccaccagatatgtctgtctagctaaagttcctcatggctatttataaactcatcttcattgcatgagtgttgcaagttacagctacaatttcaggcagttgcttaagatcaaagggaaatcctagaaatgggtgtatgtgccccagtccctaggagtgtccccagttaaggtggtacaatcagtgtaggttattgttcatagtaaagggcaaagaaacaatggaattccaaactgagtctagctaggtagcctcagagaccatgccacaagggccaaatgatgatcaggaggatgttcatatttttaaatgtttactatgcaccaggcatggaccaaaagactccaggcacattgttctcttaaacaaaacagtcatccaataaggtggcagttacctttcccatagtcgagagaacaggagactccattaggttcaggtgtggccaggtgtggttcaggaagcctggaatgtgaactgaggagcatctgactcgaccactgtgctgcacagtctcacagtgagtaacctgaaccatgtctactccttccagaggaagggaggctggggattatctaaaggtagacccccaatgagaggaggaaatacccagaaggcagagaacattcctccactcacagaggctcctccttgactgtgtcagcattcccactctccctctatggatagcttcccatcacacaagctctcaagtaggcatctaatgtactcaaacaaactgcaaaatctgagcttttaaaacgtccctgatctgctctcctgagtccaacaaatgaatctgtagagatgttgtcaacttggaaaatggagaaggaatgccccacccaatcaactcagtagatgagctttccctgaactatgggttgggaacctctaaaccagcagttctcaacctgtgggtcatggcctctttaaaataatcagaaaacatggatatttacattatgattcatgacagtagcaaaattacagttctgaagaggcaacaaaattaattggatggttgtcactacaatctaaggaactgtattaaagggttgaagcattaggaaggttgagaaccactgctctagactgtactggcatacccatcctgaaagtgggccaactttcaaaattgtgccctattttgccaaaaagctgaaaagtggttcagctatgttacccaaggcttctccaaatccatgtctgcagcctcttaggaagtgtaaaaatgtccatggggcatcagctctaccctgaagagttcttcccagacactctgacaggggtctgggaagcagttcagccacggctgggctgtgccctgggaattctagcagctgtgtttgtttcggttccttttgagttcagaaaacaaaggaaagagactgttttgaaccacttccaactcacttctttggatgccgtactgtctccttttgaaaaagttcttcatccggtttttaaaggcagaaagggggtaactgccccacagtccgtattttcctcccacctgctcaattgtgagaaaagctcacaacctaaaatagaaaagtaaaaagagctattcctatgactctcaggtaaaatcattgcaaattccaaatggcctgagcaaagtatgtccaatataattgttcataagttaaaatcccaaataccatcaatttcacagctccacaggcttgtgaatagctttaatcccttctcctctcctctcagttgctccaaagttgtgcttcttgtcctccaaggtccattgctttcctgagtcatgcagctatgggggagcacaagagtttcaaggctgggatgcagccaagcaacgtctgtgttccttggtgtcagcacatactgcccccgccagccaggctggtatgactgcttatttcctggtaggaaaaactgggcaggcgtgggttctagagggttggtaaggggcatgggtgttcaggatgacaagaggcatggtccaagactttactacgtgttgagattgccaccaatccatttaagactcagtcctggttctggacatggcggtgaacagtaagaaatacaggcaggatgtcagtctgaggccaggcagggctgcaacgtgagttcaagaccagtctaggcaatgtagtgaggacttatcttcaaaaagaaaaggaaagaaaagaagagaagagaaaagtaaagaaattcagcccttagcatggctcagtgtggcaaatggtactatctcccttctttacagctaagcaaatgaatgtttagaggtgggagagatagttatcctacagaaatgaaagccaaaatgcaaggtcaagtttgagcacagacatccactcctgggatccttcactctgctctgcagagtctcaggcaaagacagctttaggaataagtgaatcatttgaaaggcttctgcccagccagggcctcatagttctgcaagacttaactagcaaaccatgcccagagcatgtgtccactgaactctggcttccagaagcgttcctccacttatttacagtatgcagttcatgcctgatttatgagctgcccggggactgtgccttccaggttgagttacctatctctggcactatagggtcattgctttctctttcatcacttgtgcacagtacatcctgacaccttccaaatgaagcaattagtgatgactattaaaagaaatgtctaaacccagtgattgcaaaacccattagctgagcaaaattcagaaggatggggggagtccttccattacctgatatgagttcaagtagtagaggccagaaaataataagcaaattataataactaaagccaacccaatctaaaatttacaataaacaaaagggaatcagaaacctagtacttaaccctctagcagagtgtctcataggaacctatagaaaatgcttgtgagatctttgcaggctcttagccttgtcagtgaggtaaagcaacaccagtcaaaggcctcagagttactttcagctcatactcagatgcagcagtttaccgtgcagaggagaaagaattagaatcagctatggccctttggttacctgggattgtactagggagatcacccttaaattctcaccatagtggctattttgacttatttctagaggatgtcgatgttcacaatagtcctttaggtgccttattcaagggtacagccaatctcttaaacttcatttctattatgtcatcctacagaacacacaggtaaggataaccgaaggcatctatggctggcaaggtggaacatgcatggacttttatgtacttattatctctcttggcagagacttcactaagaggattctttttggatgcaaaacaacttgaaaaatgaatagaaggaagttgaaagaatacaaaaattacatttgtaggatgcagaagtggaaggctgagttcagtggtttgagtctagcatgtgaggcccctgtttgatcctgatccccgataaaagtaaaaagaataaataaataaataaataaataaataaataaataaatgaaggccaactgatgagctagaggaaagagaggggagacagtcttgcatggaaaagtacacaggagtatcagcctgcttggcaaaattaagaaagtagatggatttcaaaaagcagattcaaaaggtcacattgaaatggatagcttggatgtgtaactcttggccccagctacacccctccctcatttccaaatacaatataaattaaagttcttgcctataagccaagtaacagcctgtatttctctaatggaatagaatggtctaaggaagaactacagcagccagtgcagatagtagtgccccaaagtaaggcgctcttcattacctgggtctccactaatcttgagaaagcctaccattgacaacatcttatagaaccactgtgagtcttcttattgcttgttctggcagctgaagagaccatcaaaaatcaccagacatatgaggaaagcctacagcaagaaagacaaagacatcatctatccctggaagacaaaagacaattagagaacagaagagaacttatgagacagaactcattcagtatgccagaaatactcaagaataagtagcatgcatacaccagagagaggagatggtacatgctttgaaaagaacattgacaagcaaagcagatgctttggaacttgaaaataagatgttgaaattacaaaataacatatccatggaagacaaaaggtgacctaagcttaggaaacaacaaaaccaatggcaaataggaagaaagtagagggaggggtaggggagaccaatcctaggacaactgagattttatgattggaattctagagagcaaaaagagaatgaagggcagaagactatttgaaaggcaaaacacacaagaagaattctcagaggtgactaaagttacccttaaataccaagaccctacagagtgcccagcaaattaaccaaagatagatgtgcctctcaacacatgaaggaagacttgagaacagaagagattaataaaatgttttgggacttttctggagttgggtcaaacaatagaaacatcctcctaagtcatggtactaagctaatagttaaatatccgaagtctaggaaaaaaaaaaaaaaaaaaaaaaaaaaaaaaccaccaaccaaccaaacacaggacagcttgtttctgagggacaagaaccataggatctgaaaacagaaataacaggacaaaaatcatcatctgtgaatagatggcctgttagagaggtataaaagaagtcacagcatgccactgggtcttttattatccctcttcaagtattactttggggtgaaaacacacacatgcataaaaattgtatgataaaacaatggttgtaaaattttgtagactacaaattttttatactactgtataaaatatcctagggaatttatagaatagacattgtttttgcccatgtgtctagcaaagcaatgtttgaaggctgtatgcttcttgcccacagagagcaaatccacccttgcccatctattgcatctgaacctggaaggcagctttttgactgtgtgtaagcattaggctgaactcatgatgactgatgaatgtcacacagagcagtaaaataatttcccaaaaaggtcccttagtggcctggaaagtcaacaagcctcctccctgcataggctgtgccaacaggatataaaaaacagttggttcagtcgtggaaacgtcagcttgaaacagttgggattttctgatcttaactaaatgttttttttagaaactgaatttcgtcaaacctgtttgtgtaaatggggagcaagccataggcgcccaaggaggctttgattcttcctgctgctaaacacgctgggaaaaagaaacttcgggaagctggttattttgagcaatgactaattcctttagtgtttctttctttattttgttgtctgtgtcagtatcttgcctgcatgtttctggtgtctatggaggtcagagtttgggactgaggtaatggggtagagccctctcttggtgctgaagactagaaactcagaactgaggctttaaaaacacttggcaaacactcagaccatgtataagagggctgaagcagtgaaacggagactggatgcctgctcagtgtgggggagcgccagagggacatggaattctttaaactgcactggcagtgccatggggcttaggttgtccttgatggtattttcctaagccagatacctttctagttgactatatgaaaagcatccctcagagttagggcacagagcagactgcaagatccaactcacagctgattatttccctagacacaggcaaaccacaaggaaggagagagagagagagagagagagagagagagagagagagagagagagagagagagagagagagagaataaaaaaaacaaggtctcacaagagaaattgtctttgcagaaaaattcagagtacagggagccaaagtaggaggaactggccagtcagacaataactcaaataccacaggtaagaacagcccgggggaggtgcagattggtcatgcactcactcaaggaaggaaaacaagaagcctgaaatcatggtgaaactgtttgcccgaaagaggagttgctataaatatagatgccgtgggctagaaggaacaggaagaaaacagcaggcctgcattcagaatgaggtgcaggctccaaagtgatgggagcctcgggagatctgtgtgtctttgtattcaaaatgataattttattgagtttagactttgtgataacaatatcccttttgccccagagaagttttctggggttggagctgaagaataaatttcaggggagaatgccagaagcagtcacccatatataatcctgaagttggagatgctggccagacctcaggtggccccatgtgctcagttacctggtgtccataccttacacagtctcctcccctagagagtggttgaagtcctgtcattcctgagattgtcttgcagacagctgactgtggaaaaggccacagaaggctggtcctgggatagctgtatctgtttaaaagatcctccatgaggtttgaagaagtaagtagccatgttatagaagtctctgtctcaaggatctacaggtgacttagaaattataggaaatgctagaacctgagtttggttcccagctacagccagtcaggggctgaaacactggctcatggagtcataaggaagtgaattcggccatcagcttatatgagcttcaaagagggcattgtgagacctggggtagaagatttaccaatccgtgcctgaacttctcacccatgggacttgagacagtatgtggtgtaccttacaatatctgtagttatttgtcttgcatcaatagaaaatggtttctcaggtgcgaggcaggagagagccatgaagggtgagggcagatgacttttaacaggaaatggagaagcggcatagtcagctgatatccttcggccttagctcctcttcttaatgctaagacaaagtacctggccaatgtgacctaaggaagggaaggtttatttcagctcagggtttgagattgtccactacggaagaaaaagcatgatggtaggggtgtgagggctggggctcagtgtggtttctcttgattcactccaggacccagtttcctacctcagttaaacctgtctggaaacactctcgtagacacacccagacatgtagctcctggataattcctgacctggacaagacgacaatcaggattaactgttatgccagcatcatcactgctcttggctttcactcaggctccctgctgggcactgcctacagcacatccgatgcttgccactcacttattcccactttgcctatgataaaacccagttgtgtttccttgttacctagtttttcaatatagaaagttcttcaatattggccctacacaatgccaaaaagggaaagatttgttctgttctgttcatagtctttgattttacacaaatccttctgcaagaggacatacagaaatccttgcaactactgctcacctgcctcatgtcacatgtcatagctttctaaaataccttttttttcatgagatggtgcccctctctattctgatcctcagagtctgtctggtatctgtgaattgaatcaccttgacccagcaacatttatattttacacaaacacacacgcgcgcgcgcgcacacacacacacacacacacacacacacatttttacatttgtttatttgtgggagaggtgtgcattttctttctgtagcatgagtgtagaggtcagaggacagccttcgggagtttaactttgtgtataccaagtgggttcctggaagatcagactcctgtcctcatgctttgctgcagactctttactgacagagtcatctctgaagccttcacatatgtagttcttaacagatgttcataacttgaacagtaaattatagaaacacatgaatgtttctagccaagtgggggagggtctgggctccacaaaccaagcacacagctatactgggaagggagtcccaggaggtttctagtctacttcagtagcctgcttggcacttccttgctcttgctggttggtgtgtgttctaaatggctgtgcagtgtcttctggaggctgtaacagcagcatctgtgtagtatagctgtcagaactgccctggcccttgtggaggagaggttggacagcttttgatatgtagacaattgctcatatctgattttctcaacctccatttttctgcttatgtttcctgagccacaggtgggtagcatgcccttgctcaactttcacgggagctacaataacaacatttaatgctctgcccaggaactgtcagagttgccaacctcccctctctagccaataagctccttgaagatacggcttctgtgttaggttcttatctgtagagccctgtgtgtggtgtctgggactacagaggtggttagcagatgagagaattaaattaatggccagataggggcagcaacctaatctgacactccaaaaataagggaagaagacaagaagagggtaaatccatgaggtcaagggttttaaaaatgtcagtttattaggtgttcctcattaagatcaaccagaaagccaacaattccatcctgtcccacataattatgggatagcaaagccattttatgacattttccaaaagggtgtgtgtgtgaaaaggtctcagctgagaacaggaggtcaaggctttgtgggcagcagtgctgtgaggtgggagtgttattgagcagtaatgtatgtacatctccctttcaccacagttcctgatttctttctcttccttcaacagttagaggatattacaaatattcctttattgtgtttacaattttatgctgttaagacatgatttgacttcctgtagtatgttatcagttatattaaagcatagtgtaatttgattcattttaagtatgtcttatgctacctatttttaagcaaacagtaaggttaccgtaaaatacaaataaataatttcgtagtatctcaaagcaggaatttccaccacttccctcctccatttgcctccggtcttccttccttcaccttaccacacctctgaactgagagcctagaggagggtaccaggaaccagtcccagttacaaatgggggcttcttggtaggtctcttctcttcaggactccaatctcttaaccctgctcatacaacccaggcctgtgcctccccaggggtgcgtgtctttctctcctccccaggagtctcctccccaatggcagccatctcacagggccagcctctacagcaagggcagtctatgttcccccatatccccaggccacctcctctagcaactttagaatatgaaccttaaagccagtacttttagatcaaaatatcccagtttcttggagaaccctgcaatgtggattttgctctagccacacattggctgcctgttttagctcctggtgacccctctttcaccaatgcatcattcttcattgccctcagcatctgtgactggaagctgagcactgttcccaagggcccagcttgctctcaatgcagaggttaagcttgggtgtgttaggtgtctcctgttgctctatacgctctctagatgtgtctgctatatacatatgtattcactatatactatattctatgcgctctaaccctcctattccttccaagcactcttctacagcatgccattgcatcaatggtttcttcagtcaggactgcttttccttagacatcctcatagtcacctccctgaaaattttccagccccagctttgctggcaatacactccttcccattgcttgcatcctgggccacaattttctgctgtggtctaactctttgctctctatctttcaagatgcatgcactatttatttttcttgcatggagttccccttctatttctgaggtccactttttaaacaaaatataaactttaaactatcttatctatcatttctatagatttgatgtagggaaggagtttatcattttgagaactgagaaaaccctgaagaaaattgtgtcaattgtgtagatgtctaaaggaagaacattccagagattaagcagctgatggatggaaagactttggaggcagcagcctggttggcaggaagtggggggaacctgtagtggcttggttagatcagagtcgcctggggagaaggcaataaagtaagctcagagcaaagggaacaatggagtatacagagctgcatcttaggagccaggcagccattatgcagaattgaatttcaccctgggcaggacagaaagacacgagagaagtgaatcaacctagtatttctagatgatgttctgcctgttgagttaagaatagactggagagaggaccagggcctagcctgtgtgaagccctgtaatcaatttcagcaccacacactaagcatgacaacacacacatgagaggctgaggcaggaggaccattatatatcctcagttatataatgaatgcaaggccatcctggactatgtgcgactctgttttataaaaagcaaaccaaaatatgccatgtgtcctcctctcactacaacttagtgtcaggtggcctgcacggaatgctaccctggaccttctagttgctgatgaaaaaagaagattgttgaaggttattttaaaattaaatcaaaatcaattaggtttgcttgcaggatctgagattagcatttgctcatcagctgtgaatttccaaagccctggtacttctagtacctcagatgaagaaggtcttccagcccagctggaagcaggtactacctcacctcctctcaggctcactctgttggacaaattgcttgattgatgtcgatggaatcccacctgtaaacttgggataggatgaggtccttttgggaagatactgtggtatgccagattctttttagaactgactggatagtgtgagcgctttctgatttgtggagcaccatttgtacacggtagacttaatgagcaataagagcacattatttaaaaggcagtgaggtgagggttctacaccaattgatgtgtgtgtctgccctaggaaagaggtggccacctgcagtcgctgcttccaaaaggtgagccacaagggtgaactttgacctcccttcaacacagtgcttgtgacttgactggcagagcttgcttagctcccagacacttgaccttggggcaggtggtctcagttggagtccttccaccagttcagggcttcttgcaagggtcatgaatctcccagagtggtgaggtaatggctagagcagcacgtggccctccctgacatgaccccagccagccagagggcagccagtactaaagatcactttggcctgctgactcttaagcaggagggattcagtttcttgcctcatactttccatggctttgctggccaagctcttgaggctttgcaagcagaggaaatcaacttgtctaattactctgaggaactatctcacactccctgctcagggaatgctggaggtcaagaccatgaactctctaagttctcatatgactccagtgagattcctgaaagccctctcctgctaaagaatccagggcaaatgttagcagctatctttgttcctgatgagggagccagcactggggtcagattggctaagttgacaggttcttgaaaacaataagtgttggtcagcccagggtccagcactctattccacatgtccactcatcctcaatgtagctgtagtagaaactgtggttgataaagtacacatgtaaggatgaagaaaggttggtctaagctctcaagaacatggcagtgggtcacaggctaggtatgctgggaaagacttctgcccttgatatgtgctgtggctgtgctgctgctgtgacaaatactggacacagcaatttaagggaagtttattggctcacagtttaatgatctagtccctcatgtggggaggtagcagcggcattgtctctgtggactcagctcacagtcccctttttattccatcctggactccagctcagggaatggctctgtccagttaccataggtccttctgtttcagtgggattcctgcctgaccactcagaagtcagtttccatggtaattctaaagcccagcagttgacaacttcaaccattgcaccacaccgggatgagtaatttaatgaccctaactgtaatgtctttgtcttcaaaatgcaaaatgacagcatgagaactgaagattgtactggactctgagatctgtctcaaacaggccctctacaaggaaaagaagatgtcttcaaactgctccgtaaagaggttaccctcaaaaattggtggtttctcatgctgtgtatagttgacactgctgggtgcaggacaagggccctggaaatgtgtgtcctcggccttatgttgaaatgtaatctgtaaggccattcatgacaccctgctatctattcaggcagaactctgaatcatggaaccatttttttttttttttgtatctgtatcatgagattgttctacttgactgtgtcttagtcattaaggccctctgtccaacacaatgtgctcttgagggatgttgtgtgtcattctcaagcttcaaaaaggtctttcctcccaactttctgaaaatttccctataagtagaggtgctctgaacacaaagggaaaacagccagctccaatgaatgaagtaaaagcctcagggattgtcattaaaggagattcaactagccaacaccattcattttgtagcctgatgtggaacaggtgaggagctctcccctgcattgcaattgctgctccaagctcctagttgctgcgcaaaacctccaagctataactgctttcccagagcaaaggcttagacccacccagaagacatttaactgcataagcctccctgctgtggaaaagacagggtaccaaactgttaaagttccctttgtttcccttaacctggttcatacagctcttgcttttggccttgttttctgtgtgcttgaattgaggcttttttcccatgaggttcaagcatcaagttcatacaaaaatggaatttggccatttttggatcaagttcaaaaatggatcaagttctctgctccaaagatcagtgacgatctggggaaagcagactgagacacacattgcatctggagaggagcaaccatgtacaaaccaaagtatttccacctttggggtagttataaagagttagaacatactcataactagcagctcatgtaaacacatgggaagaattccttctctttgagctctcccttctctggagtcaacatgtgggcataaggattgtcatagaatcagctcatttattaatcattccatggcaagaaaaagtcctctcccacttaaaactaatcattatagttatatcactcaagctccagtgatctgctctgagatgattatgagcagcaagactgttttatggatgacaagatcctgctttctactgctggcttttggttcttttccttaattgagtgagtcaaggttgctttcacccactcagttgacctcaagtagtttcttgagttagcagttttctgtgagtgcacatctacatctgcatgtttccctccaaaagacaataccttaaaccctgggtggaactgaggagccatgaacagtctacaggaaccctagagacttaatcttcattttgctccttggttttgtcatttctcattcttcaacttatgtatcatggagccattagtaattcatagtatcacacacagtttccatccaatgaccaccccccctctgctttttcagagagaacctcatcacccagttatcttttaccctatagtacatgactggctagccaatgtaccaggagcatttattttaggtcaggtgctcagtattgcaaacagagacacggtggccaaaaaggtcaaaatatgactgcagagaagggactagggaccagcttcccaaaggtctcaaagggctgaaccccatgtgcctggaatggtggctcatttactttctctccattgatttctcttttcttcttcattcctgtttcctgtcatcattagccaaatgaataatccacaattaaggatatttttttcttgttttcttagaatctgcttttggaggtgctcagactaaaacaaatacaatacagggttataaaagtgtgagacaactacttaccatatcaagcctgatcttcatgtttatcttgagaaggtcagtgaaatacagagtccggacagtgtgaatcaaagctttgaatgaaacttccaaaaaaagcatcactctacaaacattcaagggaaagctggaggaagctcatgcccagcatatgattgggaacctctttcacctacaaccataaacttccagtgctttaagacaactcctagagtccttcatcgctaaactagccatcattcattcacagatcacaaagcctgggaaaacccttgtctgctaaagaggtgttcgttgtagatctgaatgcctttctttcattctcagcagctcactgtgacctagaaacaaagacaacaaattaatgttagtttgaaagcaagttacaagaaaaccttaggcatactagaaattcctctgaaactagatctgtcttgcatgttagagtgtaagttgaatatctctcacttctgtgtgtggaagttaaattctcctggttgtctcagagctgtctgactgactcaacaactctgacagtaatttctcttttagagtcagcaagctaattgacttgatcgaaaactttttgagatcattgttcctgttattttatcgtttgtcttggaaacaaccagacacatgcccaataaacattaaacacaagatcctttaaaaccataaacccaaaccaacaagtcctctgctgaagtcccgctatgcaatctgactgcattcggcataaaaacatacatttaaagctctgcaggagaagggtctggctctcatttagccgggagaaggtggagcatcgattcccatactttatatggaaggaaaaccctggataacctatggggccacaagcactctcaaccactgtcagcaaagaaagataggtgccttcatggatgtgagccttgctcatctcaggcagatgataaatggcaaatgcactcacaaggacaatacagaagttaaaattgtaagaagctgcaaaaaacaaacacgagccattgttgggccacacagggctgcaggtgcaaaggaatttgtgcccttttgcagtctttccctggagacagatttttctttgggctgccagctcacaaatagtgacacagagacttactattaattataaaagctcagcttaggcatgtttctaactagtacttataacttaattaactcatgtctttatatctatgttcttttacatggctcagttacctttactccacactgcctgtcctgcttcctctgtgcctggctggcaactcctcctttcttcttccctgagacctctctgtccccagaaatcccacctaacctcttcctgcctggcaattggccattcagctctttattaaaccaatcacagtggcacatcttcacacagtgtaaaggaatattctgcaacatttcccttcagacctcaccacatggtcctgttttgtctgacaggtagtggtgtcttacaaaaatgagtctgtggtgttgctctgtcatccaagcatctccagtttgaggacagcaagagtaaggcatggtgagtatagatctcaggagacagctcagtagtgaggcccttgcctatcatgtatgacgtcccaagttcaatctctaagtgtctcaggggaaaaggaaaaaagaagtttgtctcagttctgaagagtagaaaatccaagattgaggaccagcagattcagtgcatgataagagccatatcctgttcacaggcggtcatcttttctcggtgcgtatacatagcagaaagaggctgggggtcttcgtgatggctctgccatcaaagcctcccctccaaacactgacatgccaagggctgacatagatatatagaacacaagctgaacaattagtgaatatttaataaataatgaatgagaggatgaatggtctgaaaatgccaccctccctgggctcctggctatattcacaaagcaaagggatgatggctattgctacaactaatgcttcttcggtgtcagaactcaaacatggaattataccatacttcctatccctcttatctcactcagccatatcccaagcaatggttctgctctcctggcttcacctaggaccggattaaataggctagggtgcctttaacatttaaagggagagtgagaagccacacactggctccagatgctagtttggtctctactcaacctttactagaaagttgtgtactttgaaaatcactgagcaagctcagtacagtgtgtctcttgatcctcttagtccctatgagtttatggatgttgagagtaatggtttggatagtataggagactgctctgtgaagactagaagagagacaacagggctctgcatttttctgctctgggatttctccttgaatgagaaagaagcaagaaagaaaagcatactctgccatagacagacagtttgtgcattagtgctccagaggaggtgggcaggggtgcggactgtggtccatcaggagacagagctcctaggaaacaaacagcaaaaacaatacgaagaactatcagagagggaaggtggcaaggatggtatcaaacagcacctttagctgctgcagacctggaccctgcttcagagtgaggcaaactacgttctttcgctgaagagtgaactgtcttcacctcgacacacttgtggcaacccaggcacttctcagctactgggtaatgtgctcttaaaacactcagaagtacaggggtggcgttcatctgaaagatctggagtgcccatgtaaacaggtggagagcctggagcttggaaaatttgtcagatatggttgtaaatgttaatacttttctcacccaccagctggtaaagctggagagatgtcagctgcttgctgattgactgagctgtgagcccatccccgtggccactgaaccattccatctggcattaagactctgggattgggatggcttgggaagatggccaaagtgatcagatccctctctcggcagcctgtcccagcagctgcagtaaacccggtccatgcccccaaacgcattagtccagacaaaatagattttactttgggtttgatttagaagcgataatataaaaaatgggaacattttccatgaatgagtgaacataatcagtgtgctaaattatgaagttcagcttatgttatctaatggaagactgtaaagttacagaaattccatgtggggtcatatttcagaattatcatacaaaagtataaaacaaaaccacagttcatgcataagcgctgtgctaagcaagggtgcccaaaagtcatgagattaagcgttttgtaaaacttgccaagctaaaatgaccatggacttctcttgtttctttgaaaaacaaaacaaacacatcctccatttctactctagcagccatatgcaccacagcctctgctgtgtggaaaccaggcttttcttcctgaaccctaacaatgccttaattaacatactccaggatctggcttctttccctctcattaggaatgagttttaaaccaaagccttggacaaaggagtcaagtatatatcttgggtttctcttcatcactgtcttaagagcaaattaagtcaggcctcatcttcatgtgtctcagtgatggaagtcccagacgctggggagcaaccatggaagaactgcttcttttgtcacagtcgctgagaactcctcagacactcagcaatccagtattttgcttagtgttgctggagccttgggtgacagtcttaggaatgtaacctgtcctgcaggttacaggtgaacagcttctgcaactggctggtgtgagtctgtcctgccaggttagtggtgtagcagtgcagggatagggcaggcatgggggctcctaggctagtcttaatgaagtgaatgcagccatcagcacaaccactgtgaatgacggggcttctttgaaggtaggcacaggcatggtatcagatgactggccatcctgaaaattgtacagctaattttcaaccagttgctgttatcataaacccagaagagagagagagagagacagagagagagagagagagagagagagaatttacatgagctaatgtttcctgtgtcaatggattgaccaccactttcacacggaacagataagcaggaaagggcagagatgagtgtgatacaggagagttgcttccctaatgtgcctacagaccacctgggatcctgaaatgcttttcttatacaggtttttcaggctgcaacatgagatggatacttctttttaatgatctctagatggtaacatcaccatcctaggacctagacaagagtccagttagccatttaactacaatcacataccttaagagagctgagaagaaccatgatacaagattgtttacatctcaacaaatgactcaataacaagttgactaagccacatgagctcttgtctgtaatgggtggctagctctacctcttccagagagttgctgctgtacaaatgcaacgtctaaatggcattctgaatacagagttctaggctctttgtagaacaactgtccaataaatgcatgctgagattttaccctgtaaacaaagcatggttgagatggccaagatgtgacagggtgtctttgtctacactgtctagcctgagctgacatttcaaccccaaatcaacaatatgctcaatgatttttttcagtgaacagatgtaaatgtctaatacattgtttttcatgttttttagttgctttaaaaccaatgtggtcacaaaatgaataagcttgggaacataataatgtttataaagaacatatatgatcctataaattattttttagcaactatgaattactaaaaccattctatgaatatcttcatgcacagctccaagtgataaaataaatcctacacccagcacaatgcattggtctgcttttttgttgaggcagcttctccattctgggcaccaaatttcttctggagtttgtctgaactggtagtactctactggtgctgatgctgacatccacatcttctgatgagatctaatggtaccatagctgatgtgacagggacttgtttgggcacaggaaggagggtgtgagttcagtctccaccttctgtggtactttttgttgaaggtgacatgttttcccactcccatggaacatcatgttcatctacagaggagagcatccacgtccatgcaggctccttggggatatgggcatcttctgagatgcattaggaaaacaagacagcatacttgttactctcatgcattcgaacaatttatcaggccctgctgctgtctctcctccccaggcacaaagctgacttcctccccaaggcaactcacgctcatggaaatggcagcaccaccagcctgtggacaaccatagccttttctgaacatcctttccctggggccaggtttacttttattcttctattctgaacatttttgtatgtgctattgaagttctcatatgaacccaattaagggaaaataacatgtattaactatctaatacacaaaaacttgctattaaaaaaacttttcaaacaaataaaaatatcacacaccaaaattaacaggcctaaagtctatacaacttaatgaaactacatatagctagaattggcatttgaagtgaaaactgtgaagcttcataatacttttggtattaaatatattttatgcacttatcctccaccaaatccaaaaaatccacgacagagttagcacccgaaaaacaactggctttatttccttcttcatagctcgtgtccattacctgcatctactccttcctcatctctttatatttgtgtttactattctcctctcttcatgttaggtcttcatgtacacattttatcaatgtacaaaagctactgttatttcccatccttgcctaacaactgaagcaatcgcaggttaaagatatcttctatcctgactgacgttgtgaagtcagcaagttcctgtttggattctagctcaaggttgtcctccaagtacaagtcttttgcactatatttcaaagaaccacaaatgaagaagagaagtgcccacagggttgtctgtgagtgtgttgggtacaaatgaacattagtcagttgatgggcattggctgtgacactcttgccaggaaaatgactgtttttttcaagaactatttccatttatagagcatttgaaaatagcttccttgggtcctgcctccaagatgtattaatcatgttttgggacaatgttgctagtcactaaaaagctaataacattccatctgcagggtgtcatacaactggttagaaagtgaagtgatgaagccatttaaactactgtttgctactgggcatagttaacagattcattgcttataacttttaatagaatttactggttttaaaaaattaaataagtgaaatcaattggttggcttagccttttaacttccaagaacccagggtcttcatagcttgtatgaatatgtatgaagacaatcatctacttcagtggtccttaacccttatcaaaaagaaaagaggggatcttaaaattttgttttaaaaatccaaacattataagtacataatataaatatattttaatacaggaaacaggaggacactaggatatacaggtcaaagggtgtagagtagcagacagtagaagaacaagataaaaatataaactatggtatggagattacacttaagaatattcacccctgcatgaagaaccgcaggcagctaatgactgatgagatgagttagcttcttccaaccacctcatcagttgtccagggcagagtggtcagccctgaactatatacacaccaacaacaaaaagagacttaacagggtatagctgtgcaatacatacatacatacatagacacacacatacatacatacacacatataggtatacacacatacatacacacataatacacatacatacatacacacataatacacatacatacatacataaacatgcacacatatatacacatacatatgtgtatatgcaacaatgacaatcaaaagaaagaaaggctatcaatgaacagacacatagggtttgagagacggtaactgagagggactggaaagaggaaagagaggagggaaaatgaggtaattctatttcaatcaaaaaacattttgaaagggacactgtatgttgaagtcagcatttttactaaatgagtagctctctccctcttccctgctcccccaccccctgtactagaaaggcttggcaggttctaaacaggtgccctatgattctgttgtggagttgcagcccaggctggtgccactgtaacatactcacatgcacctgtgcaacaacacacgtgcgtgcaggtaaagtgacacgatcctgcatttgcttcccctaaagtgaccactttgctgttgacatgcatgcagtcttgtggtatactttaaatatatatgagagaattcatgttgaaaattacttgggaagattatgaaaagagcagcagcctcctgccttagactggatttgacatgaagccaaaaagtaccacgagagcattcttttatgtaccagggtccatgtgtggaggctgagccagataagtctcctgatgagtaccttcatctaactactcaagttctgcttcagcaaggttaaggaattggggctcccctctgttgcaggccacaccccctcctccccaccatactgatggtggctcatgagatctcagacactgaatgagtctctgctttatgagatctaatgccctcaggcgtaatgcgactgacagtatgatccagccacacatgacttcatgaagcatctacatttacaaggtcttctgggcaagttcagcctttcctgagcccaggtccatctggtgctgtagacgcatgttgattcctgtttgtctcactgcttaggagagggagctcagaagtgaaaagctcttctgggttaatttcctagtcacgcacgagtcctcttggtcttttctgttagtgcatagatgagtatacatcagcaaaacacatcagcatctgctagggcatgtcttcacctcttcccgacttcattagcttcgcctcatggccctttgcacagggacttcctgttttctgctctcccgaacccactctgtcgttgtttggtctcccatctacctaagcctgcttgttcctataattactattcagcttcacgcttgccctggaccactgacttgcttcccttcatcaacagaacattaactatctcgtggggagaggggtctccaaaaactagtctgagtctcctttcctgctataaaggttgtttagcagagatgatagaaacttagaagagcacagaaaaagttcatggtaacaatgagtcttaccaatgccgcctggtgactccgacatacaaaagggttgggaatcactttaaattgtttgcatcatcacaaggaaacagcaacaactcctggcttctttacaagtttgcaaagccctttcacactgattattcaaactttctttacatgaaaaacaataaaggtgacgcagctcgtggacagatggcaaataaatatcacactcattgctgagttagttattatctggatgacaatggctttaggggaaggattggagaagttaactcaaagttaactatgtctgttgagcatgtggcacaagcacactgacagacttggcattaaggaggctgatacaggaggaggaccatgaggtgggggccagccagggttacataaaaacactgtctcaaaataaaaggaaacaaaaggaaaagcaacatgtgatagctagttggtacatttgcataatcccagcacttgggaggctgatgcagcaggattgcggtgagtttgagttcagcttgtactacagagttctaggccagtcctagctacaaagtaaaaacttgtctctagctaactaactaactaactaactaactaacttactaagcagaaataactttgtgtctcttcatccgtaccctgaagtcaggttgctacatgggaaaagagccaggagcagccagcaggaacagggaacatctgtgcatctggtgcctaatactgaatctgcaaagctccctcagctctagctataattctaagaagggattttaaaaaaataagccctttaaataaaattcatccagttttaagtagacaaaagttcctaagaaaacactacatctgggaccaagaatatattaaacaaacctggggagtggaaaaaaaaaaaaaaactccatttctttttatgagtaccacatacatcaccaaataaagaaaataatagaaaatgttatacaaataacacaaaaatacatatttatgtgctggacattccagaaaatgaagcaaaggaataataatgtttaaatattgtgacattaaaataaagattaaaatcccaagataactaactttggtccaatcaggatagactgtcacaacctccaggagattagccagcttccagcacaagctctgacatcatcctcatatccaggatctgacctacctaacatcttgttctcttggtaaaggcacataaaacttaaatactcttgtttcaaacaatcctcacccatgtggacccttcttccagggctgttttccagtctggcttagttcattattgatagagcaaggtgatgattgacagctttcagccccagtgcatgatgattagcttagctgagtatcattaatgaatcttttatagccacacactgagaggagagtggcttggttcagatctacaaatgaaccttttccagtacaaaaacagacaaatcaaaccataaaaagatggacaccagaagttaacacactggttaaaggaggcctgggcatttttaattagtgctattctgaaattccaaacaagatattgcagccagatgtcatgacacttgcttgtaaaatcactattcaggaggctgaagcaaaaggctggtaaggaaggagttgagcattagcctgaactacatagtgagttggtggaagcttaggcgaccaagtaagactgcatcacagaaaaacaagacaaagatgcaggaacagcaccttggggattgtgaaaacactccaaaatccataaatgaaccttttcaatgtaaagtcacccactcctggtgggcataagaaacctctgcatagtcatggcttaactttcccaacagaatgggagtttgacttaggcaattaaaacaacaacattggatataaggccaggaagtctgaattgaccaaaacttctccctttggtaatttacataattgcttgcagtcttgtttcccctacagtcctcaaagtctctatggtgtgcaacatcttaaacaggagattctgtagaaaggatgctactctcacagtgggtacttcagtggagatgtgaacaaatcctaaaataatcatttcaaacaatatgactttggagtgtccgtgaggttctgatcttttctgatagttgctatagttattctctttttatttttcttgtgctctgacctatcaggagactgtatgctaaagcagtttgctgatggcagaactcatggggatgtctcatacaatggaactctccatttaagacacactgtacactcccgccagaagacaggaagcctaactacagatcatcacctctccttcctttcctctaaatccagcctcctagtctcacctccaactctgtagcagaccacatgcttccttagacatccccttccctctgcccccatctccagaagaccacacaaatcttcacctccaacattcctccccactcaccctgtcatcccaaccctgaactccagcaggcattctctgagaacctgccagccaagcaatccagcaagtaggccagcaggcacttgggcaagcttcaacttgatgggggatgtctttctgtgtatatgtttgccttattggttgttgaataaagcactgttggccaataggggagcaagataggtgggactaggaatcgaggagaattctgggaaatgtaggaaagagaagtcttgtgatccaaggcaggaagtgacatagcaggcagactcagactataagcagggacaagcagaaaatcatgcccttcctcttcctcctcctctcttctctgtggagctgccatgtgattccagaaagaggatgaattccacagcatcctccataagataagtctttataaaatatatagattaataaattctagtcattggccagcagcattctacctaatataagtctctgtgtgttatttgggggcctatgtggctgtggggctcaggaggttggtggaaagatttacccttatatcagctcttcactctccctcctctcatccaaacccaatccctgctctcacccctgactctgtaacagaccacctattctggcctttcctcactctccaccccctttcacaacagactaatcagatccttgtggcacaccatgcttttttccctctcgtgaactatctcagccccctctcccagcccatccccattccaaagtgtcagctccccaaaccaagaaactcatttttacccagaaactccagtggccacacctaacaaaggaccagaccaaaggcaacacacagccaccataccttcctaagaaccagagagggcaacagaaatcaaggaacaaaacacccatccaacacagacaagaccagatatcaacaaccagaattacaatcagcccaaacccagatgcctaaatgtcaatgtaaaaacacaataataaccaagacaatatgtctccactagagtccagcaacaccacgacagtaggccctgggaattgcaacatagaggaagcacaagacaaataccttaaaaatggcctttattaacatgatagaggtccttgaagaggaaatgaataaatctaaaacaatgaaaacacaaacaatgtacggaaatgaatgaaactgttcaaggcctgaaactggaaatacaatcaatagagaaaatacaaaccgagggaaagatgaaaagaaaaaagtttaggaactaagacagggacctgaggggcaagcctcacccacagaatgcaagagatggaagagagaaccttaagcattgaagacacgatagaagaaatggttatattggtcaaagaaaatgttaaatctaaacaattcctgacacaaaacatccaggaagtctgggatactatgaaaagataaaatctcataataacaagaatagaggaaggagaagaaacccaggtcaaaagcacagaaaatattttcaacaaagtcataggggaaaatttacctaacctaaagaaggagatgtctattaaggtacaagacgcatacagtacatcaatagactggacaagaaaagaaagtccccttagcacataataatcaaagcaagagatgtacataacaaagaaaggatattaaaagcattgaggagaaaggaccaagtaacatataatggcagaactattagaataacacctgacttctcaatagagaataaaagccagaacagcctggacagatattctacagactctaagagaccacagatgccagctctacccagaaaaactttcaatcacaaaagattgaggaaaagaaaggacaatgataaaaccaaatttaagcaatatctacctactaatccaactctccagaaggagctagaagggaaactccaatctaaggagattaaccacacccaagaaaacacaggaaataaataattctagatcagcgaatcaaaagagaagaaacacacacacacacacacacacacacacacacacacacacacaacaacaacaacaacaacatcagcacaacaaccacaatagcaaactaacaaaaatgaaagaaagctgcttgttgttatctctcaacattaatgatctcaattccccaataaaagatgcagactaacggaatgaatgcaacaaaacaaaaacaaacaaacaaaacaacaaccaaggatccatccttcttctgtatccaaaaaaacacaccttaatatcaagtataggctcacctcagagtacacaaatggacctaagaaacaagctggtgtagccattttagtatctgacaaagtaaacttcaaaccaaaattaatcatactcatcgaaggaaaaatccatgaggaggacattgcaattattaacatctatgccccaaacacaagggcacacaagttcataaaagcaacactattacagctaaatcacatattaatcctcacacactgataatgagagacttcaatccccactcttgacaatatacaggccattcaaacaaaaactaaacagaaagatcctggagctaactgacattccaaaccaatggaccaaacagacatttacagaacatttcacccaaacacaaaagaatataccctattttcagtacctcacggaactttctccaaaattgaccacatactcagacacaaagcaagtcacaacaacacaagaaatttaaataacccctgcatcctatctgaccaccatggattaaagctagatatcaacaacagaaatagaaaaaagtttacaaactagtggaaaccaaacaacttacccctgaatgaaaaatgggtcaagacagaaattatgaaataaattaataaattaaggactttctagaattgaatggaaatgaatgcacaatgtacctaaacttatgagacataatgaagatggttctaagaggcaagttcatagcattaaatacctattaaaaaaaactggagacagcaatagcacacctgaaagccctaaaactaaaataagaaagatcccaaaaggagtagatgtcaaaaattatcaaacttatggctaaaataaataaaacaagaaaaaaagaataaatgaagcaaagagttggatcttttattttgttttgttttttgagaaaatttagaagactgactaaccctcatccaagttaactaaaaggctgagagagaagatacaaatttacaaaattagagatgaaaagggggacataacaacagatgctgaggaaatacaggtaatcataagaacatactttcaaaagctgtactccaccaaattggaaaatctaaaagaaatggataattttctcaatacataccacttaccaaacttaagtcaatatcagatcagcaatttaaagggaactataacccctagtgaaatagaagcttcatatggaaacaaaaagcccagtatagctaaaataaccctgcataataaaagtactttgagaggtaccaccatctataacctcaaattgtacaacaaagcaataataaaaaccacctggtttggcacaaaaacagacatattgatcaatgaaatagaattaaagagccagacataaatccacacactatggacacctgtttttttttttttttttttataaagaagccagaaacacacactgggaaaacggcagcatctttgacaaatggtgctagtcagactggatggctgcatgtagaattcaaacagatccatgtccttccaagcataaaactcaactccaagtggatcaaagacctcaaacacaaaaccagacacactgaacctgatagaaaagaaatggggaataatattgaactcattggcacatgaaaagattttctgaacagaacaccattagcacaggcactaagatcagcaatcaataaatgggacctcatgaaacaaaagttttgcatggcaaaggtcaccatcatttgatgggggaatgttcttctgtatgctgtgaatatatgtttctcttttggttgatgaataaagatgttttggccaatggacaggcaggatgtagccaggcaggaagaataggaggggctaccagactaggggaaatctgggaagatgaatgcagagagtaagtcgtgaaagagacaccatgtagctgccaagaaagcaagaagtccaggcatcactgggtgcattaggccaaacagtttttaattaatataaacctctgtgtgtttatctgggactgaaggatgggacagaaacttccatcttcaattattaggacaaagtggtggcccacagaataggaaaatatctttaccaactatacatctgatagaggcctaacatcaaaaaatatgcaaagaattaaaaaaaaaacagatatcaagaaaacaagtaactcaattaaaatgctgtacaggttataaactgagaattcttaaaagaagaagctcaaatggctgagaaacattaaatttgtttcaacaaccttagctattggggaagtgcaaacaaaactactttgagattccatcttacacctgacagaatggctaagagcaataaaacatgtggcagcccatgctagcaaggatgtggagtaaggggaacactcatccattgcaagtaggaaagcaaatgtctgcagcccctatcagtgtggcagttcctcaaaagatgggaatagatctaccccaagatccaacaataccactcttgagcatatacttcatcctacaatagagacacttactcaactatgttcatttctgctctatacataatatcgaaattgggaacaacgtaatgtctcttaacagatgaatggattaaaaaaactggtgcatttacacagtgtaataattatttagcctttaataaaaaatgatatcatgaaatttgtaggcaaatgggtagaaaaaaaatcatcctgagtgaggtaactcagaaagacaaataaggtcatttattagctgttaaatcagtgataacaaagctacaatccatgaactaagaggctgggtatagggtaagagactatggggaacagaaggatctcccaaggaaagggaaatagagtagataattatgggtggatggtggcaatgactagaaatggaggatcaattagggaagtggaggaaagtgggggacaagggagggaatacagggagagatagataaaattaagagtcatttgaggggtaatgtgggaacctaatacagtagaagcttcctaaaatatacacaggcaatctaaattaaattgccaaataatgagagagaaagagccccaactggatatttcctgtcaacaaatgaagcttccagtaccagaaatgggttacatttaatcaagtttttgggcaaagggggtttcaagggaatcctcaaattacctaggttttcaaaaggactatgggttgctctccacaaactgatgtcaaggccctattgctgaagataatatgtacatcgaatgtagagaagtcaaaggcatgcctatatagagccttcacctctacatgctagtgtctttggttcaggaaggttctcttcacactaccaaaggaaaaccataacataacataacataacataacataaacaacaatccagctataaaccctttgatagatggtggtgttcagcctgcaatggtggcataaagcttgtgtgtgtaatcagccaataactgatttgacttaaggcccactccacaagagagaacacataaatggcactgcttgagtaaccaagaacctgagactagaaagcccaggaaccttggataaaacaaaatgctattgttctacaaaaataatacagtataaaaatgactcccaatgacattttgctatactcatagaccagtgccttgctcagccatcatcagagaagcttccttcctcctacagcagctggtgagaaaccttggaacactcagccttaaacagtatgtctccatcaaatccctccacccaggcatcagggaacccttcagaaaaggaggaagaggaggcaaaaagagtgtaagagccagaggtgatggaggacacaaaagaaagaaagccctataaattaaaataattatgcatacataaactcacagagactggggcagtttgcacagggcctgcatgggtctgtgccagatagggtcctagagctgaaagatgtggacacatgcccccatccctaacccagaagctatctccaagtgataaccactagcaaatcacaatctagttttctccaagggagtctcattagggaaaccagttactattaagggtagactgcatgctcagtagtaggtggtcaacagaaagtgaactcaacagcatctttggaggttccttgtcaagactttcttagaattttgtcttaattttattttacgtgtgttttctcttcttttatcatacaggtcttttgcatatatattatggattaccaattattgttttatgggatttctgagtgtgagaatgagtgagagtttgcatctgtatctgtttcctgtgccttttcttgggctcttttctatatctttgtttgttttgtcctgttcttacgtgtaatttttgttttaccttatcacattttattttatgctattctagctcattattatccattagaagcttgtttgctttctaataagaaacagaaagggtgtagatctggattggagaggaggtggggagtaactaggtggagtagagggagaagaaaccataatcaagatgtagtatatgaaaaaatccgttttcgacaaaaggagaaattaaaataataataattttgaaagaaggtggcctgtaacctgggcctttctcccagattcctggcaagcaatgtatctgggagccctggatcaccctggccatgtaagacacctcggagtgaaagcttggaccagccaacagtttaggctgatgccacacaggcagttctctccactgctggatactgagtgccctacaaggacactcactgagccacaagctggagacgctggctcacagggcaggcttctctcatctgctggccacatgcccaggacatcaggctgctgtctgagtagtatcagcagaagtcctgcaggataaccccacctgtctctaaacacatcattcactgggcatgtcattttgtgactcattactcgagtgagataatgataatgtgcacaagatccatgatgtgatttatggagaattctgagcacacacagaaaagtcgattaatttaactcaaggggccattgtggttagttgtccctgtggagtaagttattgaagcagctttaaataagggatagaatattaagccataaacagtcatttatattcagtttaataacagatcttcagattcaactttgacctctataggaccagggcatggagaaaatgggcagaggatgatttgaaagagtcaaagcaccaatgggagctggcaggatagggtaggcaatagaacgggggctagtggaagaagactccagagtctaaaagtgaaggcagagccctgctcagaacaatagagagacatggtttgcatctgaactcaggtctaactccccgtgccactttcacaagtgactcaacttctttccaggttatcgaacttaacacaaaatgataagtgagattagctcacccacaaggacccttcctggagttcaaacagcagagctttccataaggagtctctgataactttatgtcatgtgcttagcttagaaaaattctgtaaatgtcaacactgtccatgctacacatggtgatttgcaaataagtcaagattttaaaaatatctctcttataaaaatcctctcaatgttcactgtctcaaggttccagtaaatgttaccattgtcttcgttcctttgtagtttaaaatcactaaagatactttgcaaatgatgcttctaaggaagcatattttagctggtaggaagagggcaagtcagggccttgtcattcagggtttgaaaatatttatgttccaccattgtatggtttgttatattgttcaggacataatttattttgaagttttaaatcatggcaaagaagaatgttaagttatacttaacaaaattagaaggtaaattaccaagaaacagatgattatggcaaagttgtttttatgtttctctgttttctatggaaattaaaagttttctatcaaaatacctgctttagtaaaacaatgagcatagaattgtgaagtgttcttttaaaagagatgcaaaggagagctggaaagttctcccaagagcaaccaaatgatttatgaggatagatacatagagggcaaatagaagatgatgtaggattaaagggctctgcttagcttcctgggttgttgccagaaagttgagattaaagaagcaaccagtcagtgagaaactaacccttggaattaagctgaagagggtcctcaccacacacacataccatgtcaccaactcctcatgtgcacagagctctagcagcatgtgaactcataagtagtatccacacaatcttcataggtgaggtacggctggacttctggccttccaatatgaacttcaagttgctttgttaggctggttatacatgcatttgcagcactctgtctccaaatttatttgattataaaaataaatgtgcagatattcacaaaaggtcaggagctgtgtttgtggcactgcctcagagcaaggcttttgtctcctggggtgcatctaaatgggatgctaccaacaatttactaaacatgcttgtttgaccagttcattgtcacagctacaggacttcaacaggacaacaaatccacatagaagagcaagatgacccctgtgtacagcagcaagcaatgaaaagatggaattcataaataccacacgcagcactatactcccacccaaaaaaaaaaaaaatcaagtgctccaggacaggtctatctgacaaaaagactttataagtgaaaattataaaatattgccatgaagacctaacccatgcaggatggtgtattgtcttttgaaccagagcctgagcaaagatgtcagctccttcctactaatgtacaaccttgatgcatcccagcacacacttagactctgagatgtgtaggctttattcaatatgataaacttgagcagccaaaataattttgaaaatgagtggcaagcttcatgatttcaaaacccaaggtcaagacaaatcacatccatacagaagccatgccactatggaagacacaaaaggctttctggccatgtcagtcagctatgtcgatgggatacagttaagagtagagaaatagactcatggtcatttgactttcagcaaatccgccagtgagaaaagatagtgttataagcacatgacgctggaccaagtggactagcctgtgggagggaatctaacgacagtgaacttctgcccctcataccacaagcaaaggttaattctgggtaaaatctcaaatcaaaacaaatgaaaactggattttccaaagaaaacatgagatgccatctctgggctttggaggtgaacagtggataatatccaaaaagctataccctaaaaaacaatattgtactccactgcggacatctgttgaccccaagaactactaagaatgctatgatgctaaccagaagctggttaatactgctttcagtacacagacctgacaaataatgtaaaaccagactatgtagaaattcagttgagaaaaaaagaggcattgctcacttagcaatgaaacctatgaaagtgacttatttagcatatcacagggttcttagtatctttgatcaccagggaaataaaagttaaaggcatatgagatacattacacccactaacttattaaactaaagagctatcacgtgaggtagggcagtaggtaaagtgctagttgtgcaaggttgaggggctgtgtttggccccacagctcccacataaaaagttggacatggaggcatatgtctataccccattgctgggagggcagaattgggagggtgcctggggctcactggccagacagtccagctgagttggtaagctccaagttcagtgagagactttggctcagaaaataaggtggagagcaattgagaaggagatcggcctccacatgcatacatgcgtacatgtgcgcgagtgtgctcatatataggcccccctcacgtatatagtccatacacaaactaccaatagctgatgttaacaagaaaatgaagttgacctgagacctcagaatactggagacatgagcagtgtggaatgtctacccaagaaaacgtgattgaagtcagccagggagaggccgtgtgagctgcagagcaatgccgtgttgtaagaacatcctatacctatctgacttcacatcccgagcctcctggcctggctgcagggcttgcaactagacttagcatttgctttccttcctttttgacttgctttggttccatcctttcttgcagttctgctgtccctctcttgtggggtggggatgcttactctatgtcattgcctctggaaggaaatactttcctttttcttttccaggggttcatagctgacagcctgccttgggtctcaagagcagctttcagtttgacttttgagggcacttggtgataaattcactttgtattgagatggccacaagcctttgagggccaggggcagaaagttatagattgagtagctagtgttccctacagggcagatttgaacacttgatccccagtagatgacgtgccttgggattttcccagactttagcaggtgaaacctacttggaggaagggggctcctagaggtgtggttttggaagcttgcctggctccccactctttctttccctctgcttaatgtcttccacaaggtacacagactcttccttcacaaactcctgccaccatgatgttctgcctcttctgggcccagaatcaacagagttaggtagtgtaaagccatgaaaccatgaactaaagcatttatcagtgtgctggctttttctagctttatgtcagcttgacacagagtcatcagagacaagggaacctcaattaagaaaatgtctgaggttggaacaaactgtccatgcctccagtgtacagggcacagcagtatctctgaattgtgatccacataatgaaatggctcatcttcagggtatggtgtgtttccttcactagaggaggctggatggtgtttcgggctctcctggtctaaccgccattcaacagtgaacaggtgttgccggtgtctcttaatttaccagctgtgcactttcaggcttcttgttatttctggaggggcaccttggtgccatctttttaatgagaacaatcaggtattcgtgtttacttaccattcatttcctcttctgtgtgaacatacccaggtctcattgggttactgttgtctcattctgctgtgaggagttcaggtttctgtatgtctctgatgaacaaatgtccctgtggctatttcattgcaaatgtatatctagtttgtagactcccttttcacttcttaaaaaaaattatttttattaatgtgcacacgtgcacgacacacacagacacacacagacacacacagacacacacagacacacacacacacagacacacacacacacacacacacacacacacacacacctgttcacagaagccagaagaggaagccacatcccctggagctggggttacagttgagagcttctttacatgggtgggaattgtggtccccctgtaagagtattaagtgctcttaatatcttccatctctccagccccttcaatttttttggttgcccttttccaaacaggaaagttattctcccttttaagttgattataattgaatttatcaatcttccattatagttcctatgtgatactagaaactcacatcggatgtggtggcaaaagttgaaaacaacccagattttcacaggagaatactcagcatgctgcagtgtgttcctgcaacacagcactgtatttctgaatctgtctgtggcaggtcacatgagcccacatgggtaaacctcatccatgcaaactgaaacttgcaagcagcttgtggaacagcacaaaacggcatgaggggagtcgacttagaacaagtctcaggtgttactgtacacagcattttccaaagcccttgatattcatggcagaggttgattccagggagggaggggcgtgacctagaggccttcctgggccttcagagagcccagtgaggaccagctctgtcctctggagtaatgagtgcaaagttgttcatttttgtccttttcattttttgtaggtgtatttttatttattcacatgtctgggtctagcatgtgtataggtatctgtggaggccagaagagggactcagaccccttggatttggagttgatttatgggtggttgtgggtgggtgcttgaaccaaactcaggtcctctgtgagagcagcaagcactcttcattgctggctgcagaggcatctctccaaccccagctttatctctcttttttgtactttattcacatggtgtaaatatctcatttaaataccctgatttcccatgttcaccaagcactagagaattgagagaaatcacttggctcctgcccatgacattacaataaaaacaatccatgcctttcaacatatctccctggttattaaatttattttctctgccatgacaagggataaaacaaatgtcctttagggacagtaagatctttctagatatcacctctgtgtttgcagacacatttgctctttatttaaatgacaaacagccgtatctactgggcatttctccaaagtttaaattaaaaaaagaaaaagtagatcaagagaaagatcacgttccagcatggaaacacaaaagcaaccataaaacgtctctttctctgagggcatgtttgaccatcaagatcaccactgctttgcacatttatcaagcaggcttagaagaaggcagaaagatgactgagtcagacagaattaacagtttgtcatgagagaatgtagacatattcatgtttctggttcctactcttgtaaatttttttttagaaaattaattgaacatgacagaggaatgcaccaatggttaaaacaatcaggcagctgagagaccaataagaccaataagatattttggggtgagacatttttgcctagcatacatgtaaccatactcatttgctctcgctgctcccctgtgtacagacacatcgcagaaacctctctcaccacacagctctgtctcataaaacaagaactttaactataaagcagttgttttcatctgaaggactgaatgtggcctgtcgggacatgcccaagctggccttgcctgcctctgtagtaagatcagaccacttagctcccagcctttttccaacagagtcatattccagggtccttccaggctcatgtttctctacttctacagaaaaacagtggagtgtgactctcattttcatcttatagaaaataaatatcccttgctagcacatagaatctacaagtccataatgaagaaatctttgatgggaaagttcttggaagggcctgccatgtctaccctgaagttctgaaatgtaaataaatgtggagaccagtaccacttctttctgaaatttcttaaagagaaaggcttgatagagaacctgtccttgcagagttaggggagaccctggcttacagcacttggaaggaatatggaagggtctcccatgtatcccatccccttgggctttggagtataaaaatatacacttcagaaggagcccgtgtcttagagaaggacttacatggtagccagaaaaagcaaagcctttagggcagactgtaaatatgggctccctctctgaagggtcctccatgatacaaccaaggggacatattcacactggcccatctcaccttcatcctacactggaacagagttaccaggagcagacagaattcagtcaaaccaccagggggtctgggtcacttgggccccatcccacaccaattagaaaagacagcacctccattccccttgtttcctgccactggtcttagcagaagcaggaagttaagaaagcatctccgagcctggccctgccacttgccttactgtcaccacaagaagcacacactggagaaagaagagaaagtgagcttgcaagtgccgtttgaaagtagacagagattttcataacaaccccaactgaacaactacagcctgtgcccaaaatatcactcagaagctgggaaagataggtgacatagaccagggacctgtgagagatgagaagcggagactgaggcactgtcctcgggtctctgtgtgccgtaacactcaattccctccttccatctactcaattcatgctcacacataataaacggttttcaagctcttagaaatgattgctttttgttttaatatttctaaaatgttttcttattttttctgcttatgaatttgaaattcattcatgcttccatctatttgtcaactatatagtgtgttctgaccagcaagaaggagccatgggccctgtttggggagctggtacttcctggcccacagggcccacgctgacatctttcaagagcttcagtacatgggacatacaccccaaaggttatacggcacttctcagaccccacccattgctcttccaaccctgcctctgggattcctttttacccaccactccttgcccaataaaaatctttcttttgtccttgaaacaatcccaacatcttaacaatgttttagacatacaaatctccccgtttgtaggaaagggcatagaatttcaagtcagatagggctctgagttcctgtctgagttccgtttctccccagatggatgtcatgaggttgcatgtctcccctgggaacctctgtgctccaaggagaagagtctgtcttcccaggaggggatgctgtgaatgccatgtgagataatgtatataaaacactaagcattctgtaatgacacttaatatcataattcaggtgaatccgagaagatcacttaacctcacagaaccttagcgcgtttgcctttagaacagagtatcaataacaggcttgtggacttcataaagttgatgtcaaacccattgagataacaaatgcgaaagacaccgtcgatgttataaagagctattcaactgtaaggtgctgttagcatccataatgctgcacttctttttaaaaaagactcaaaagaaaacaagggagagggcttggatccagccataaagctgctgcctctctgggacatttgtaagcaatttagaaaccattcatctctacaggttactatcattctacttcaaatcaaagtataccaaggagatcagacccctcagcttgttctcccatctgccctctgaattccgtttcccaagaagtagaacaattcttcaacattttaggtgtcaggaagagtcaatgggacaaacaccccaaaggttatatggtatcagtataaaaaaataaacgatgtgcaagcacttagatagatactaggaatatacacatcaggggtctctataggaggagtggcctttgattgacttacagacacttcttgggagataagggaaatggccacactggtttttgggataataagcaactggtacaggagaagtaagatgtttggtttagtaagcatctagtgttagctagttctggtcaggggttagatgtgtgagtggctgtggtggagaattaactgctgtggtatagttgggactggctttctgccactagagccactgagccctgcctgagtggagaaaatcttctgctgaacttcccagccttgtggggacagcagggaacatagtcctcacgtgtggggtctctcctaccctgaattatctgggctctaccccaggcatttctaagcgcagaggccgggtgactgatccctgatgtcctctcccctccttttctcatttccttgatcttcccttcccagatttctcctcctatttattctctctgcctgtcagctccacctgtcctttctcctgcctacctattagccgttctgctctttattgggccaattaggtgttttagacaggcaaagtagcacagcttcacagcgttaaacaaatgtaagatgaaagaatgcatcacatctttgcatcatgaaacaaatgttccacagcataaacaaatataatacatcttaaactagtattccacaacacctaggcacttgtctgtgagggtttttccaaaggggtttactgagcggggaagacacatctggaatggaggcagcactgcccataggctggggtcccagacagactaaaaagctgactgtggacacaatgtgaccagctgcctcacactgatgctgccatggctacaactgctcttgccaccatgccttctcccacgatggacagtgtccttaaactaaaacaggaaacttccttcttgaagctgcttttccaggtattttgctaaagcaatgagaaaaatattagcacaggagttgatggatcgcaccaccctgccaccagctcaggcttgttcatgtggatagagcagggttccaagagaggtcaagctcagaagtatcccattgtcacttaaagtgcattctgcaggccaaaacaaaccatggcgacaaatttcagggatcaggacttagatccttccttgtgtggagacaggtggtacagttgatttttaaggagattcgggaccagcagagccttcagacactacagtcagttcagtacacattggaagggtctgactcttattccaaataggggacaggatcatggaaactaggagaaagataactgatggggcaaggaagataacattcaacatgaacaccaacttacacttcagagccttgacctgggtgataggtggcagcttctgaattagtttaagactgagccaaggatttcgtgtgaattagatcaaggcatccatggtagctctgagcagtcactggcatggagaacactggaagccatcaggattgtaaggagacgttaggaggccctgcaggacacagttaagcctgatgtgtccaccaaacattcaagtggaagtgttgactacacagctggtcacaggaacttgagcaaggatggagaaatcattgcaggaattgcttggcatacagctggtgcttaaggcttcagtgtgactgggatcaccaagggagtggacatagttaaaggagaaaggaaaacaaagggctgggcctagactcctccaataacaggagaagaatgcttccaagaagcctgagatgggtcagccagtggtgctgagggagaaccagaggccatggtgttctggaggctatgtgtggaaagatcataaaagaatggggagacgattagtggggtcaccactaaatccaacttctgcatgggaagtgcttggatgatgaagagcttgtgagggtttctctggaatggggactccaagctcaagcacatgcatattagcagaaaaatgtgctcttggtctgcctgagggtggtggtggtgagaaacaggagtccaatctgctgggggggggggcttgaacctcctgttggtagaattccctagtgcttcagatgggaacatcatccctgggtccaggcagagaagcccccaaatatcttagacatggaagtgagtgaggctctgaggagcagctatggtcagaaactacagttggtggagaagaaaacgaaagaaagcagacaaacaccgagcctgagaaagaaaaaatgtgggtgatttgaaccaagacgtttcctgccagatttgcattactctggctctggtgttcacgccctcaggtcctctaaccagaactccactgccctcagagtcccagcttcctcttcctgtttctcattctgcaaaagttcctggctgttcctgagagatagagggaccctggacagggagtaaaagaacctacacttaaggctcactaccaccaggagctacctgaattaaaatatgagtttcatgggattttcgggagaattctatcgaatgagggttaaaaaagtatcttctaatttgtaaagtgttatctaagtgttgggtttttattgctgtgaggcaacaccgtaaccaaaaagcaagctggggaggaaagggtttataaagttacacttcagcattgctgttcatcactgaaggaagtcaggacaggaaccaaacgggtaggctcctagaggcaggagctgatgcagaggccatggaggggtgttgcttgctggcttacttcccatggcttggtcggtccacctatagaacctaggaccagcagctcagggatggcaccactcaccatgggctgggccctcctgcactgatcactaaatgagaaaatgccttacagctggcactcaaggaggcattttctcagctgaggcttcttcctctgatgactctagcttgtgtcaaggtgacacacaaaaccacccagtacactaagtatatgacacgtggtcccagggacgggcctggaagatgttctttccatatagtgtcagaggagaaaagagaattacaagatgattccacactgaaggacttgggaggactgacccagagccagatgggaacagcagcatgacaaatgataatagccacccccccccatcccagatagcaacctggagctgtggcaggatgaccttgctgctttgtcccccatcttcactgagcttgttgtctctgtgaggttctaggtatgggagtacttgatcacccccaaagaaatcagcagccttgaggacagaggacaggaaaacagttttggaggaaactccctgggcattgtgagaaaggaatggtaggagaggcagacagcacttcagaggccttcagaaagtagcattcaggtgagggatgagcttgaggagaaagcaagtccagagcagccctgaagtcacacatggtgagatgagaggtgcataatgtgttgtatgcagtaggtctgtctgacctcaagtgacatctccctctaagaggggcttatcaaagaagcccgtacttcagcgcctactttcctaccctcttgaactgattactatctttatagtcattaccattagtttatgtggatgggtgttttgtctgcaatatgtttgtcatccacagatgcctggacagggtcagatcctttcgggctggactgatatacagatgcttgtgagccaccatgtgggtgctgggaatcaaacccaggtcttctggaagggtgctcttgaccactgagatatttctctagccttattaccatctttttaaattttaaattagactgatctcctaactaacccaaaagacataaattgaagtcattaatggaccagcatgtggtattttaatccatttatacactgcacaatgttgatatgaacacttatgtaaaggacattaaatcagatcctgtgctcctgtgttcaccagtgacagtgttcaagagaaggaaacagcttctgtgttcattaactggcaagtggctagggaaagcatggtctgtgtgcagagtagaatactattcagccatgaaaagaacatgtgacaacgccagtggaatcgttacattggtcatgttgagtgaatttagccagacataaaaacacaagccccacagtcatctgttgtttatgaaacagttggtctcacagaagttgggagtagaacagaggttatcaagctggggaaagcaaggagggagaggagtaaggggggcaggtagacatgtttaacctgatttaaatatcactttcttttgttttcctgtgttgtctctccttttcccctgatgcctgagggtggctttacaggctgctgtgcagataggccattgtctcttccacctttaccagctccctctcctcatttgctcctggcaggactagtgttaccagggaagggctcctagctgaagaggcagaccgcattgacttgtgtgtgaccctttccaccccctctgccacaccagaatagtgcacaccatttccaatataaaccatgcagctcagggcttctaccctgcagagcatccaataacttttgctgagccatccaagcccaagaaaaagtaacccactgtgacgaacaaaggaagctttagctcaggccagtacccgccagtaaggagaggcaggcaaaggcacctccgggcaagcatggtctttggagggctgccaagctggctgtcctgagtgtgacaaagcaagggaggaccccagtgggccccagtcaatgagaaacagatctgccctaaaaataataatgagtgaacaggcatggttacaaagtcttgcttcagagtaggtttggcacaaaatcagacctaatgataggttcagaaggaaaaattcatggttgggatttggaatctttgagccaacaagttatccacaaacaggtccaaagcacttctgctgcttttcccagcagggcttccaggccagggctctcgcctgacagctgtcctccacagaagacttcacagtcatttctggagtcgcctactccagaatagagggatggaggagaactaactcatgaggacacatagttccagttcatacatgcagggtcagagattgtggtggagtaagcttttcttggagaaatgggaagaggagctcagcagagggaggaccttccttagccctcagatatttattgagcacttcctgaaagatgggctctgatgggagagggcacaagactaacagcagtcatcctgcccacacactgcttatcaaagtgcacatctcagattgatttaaaaataagtgtgtgggggtgggagatgatggctgttaccaaagatgcctggagatcgtttcactcttgggccaagtccagatgcctagaaggctgtgcagaaaaagttcatgaaggtttacttgggttccggaggagcacagtgagggcctgggtctgtcagagctgtccttgaggatggaatggagagctgcctgtgcagggcccacctaatgtggcctattgtacaaataggaaaggtgagtttcaggtggggagggaccagctctacagctgagcctccactcccctccctttgaaaatggaatgtaacagcatattccagaaggggcagacaaggcccagtcacagagagaaagagctcaggaagaaaggaggagagacctcctggaggccccagggcagcactctgctaatatatttgtttttgtgggctcctatgagccctcttctttccttgagcatagaaagtcaagatgagtttgtcctagaacccagcctgggttgagctcagaagcagtttgactggtttctgtcataagccacagcttctgaacacacacacacacacacacacacacacacacacacacacacacacacacgagagagagagagagaaaaagagagagagagagacagagacagagacagagacagcatattagcaccccaaagttacttggaagtcagcttctctgaaatctaaggtcctgtagagatattatttctctatctctcttcagttaataagactgtataaacagcagatgctcatccaatgtttatatgtggggtaaatgcatgaacaaatgattcatttctgtttttagaggattcagagattgggggagaatgttctagttagagatagagtaaaatgttcactccattgttatttctaaggaataaataaccaccatcatcatgctctaactaaactttactgagggattacctgggaacaaacatatcaggagattgtttatcatacaatgctagaactccagaatctaagctctcacctaccacaggttgtcaagggagacggaggaatgccatgctccactcagatccgggctcacttcctgaaggctctgccttccctgaggactgtgcttccctcctgagtcttggcattccatccacccagcagatgaaaaaagtttagatgagaatgggggagattttaaaaatgagaatatagaaaaacctgcctttcctagactaaagagtcagagacccttgtctggattcctggggattgggaaatgtctgctggagatgatgaagaaaggaaaagaatttcactgtgtctgaggagcttccaccatgatgcactaactcatctctcaagacaacctggaaactcagatactacttttagtacttctcacaatcaaacattcagtaaatagcagaattgggtactctagactaaaggagctaggcctcttgagttcaagttcaagtagattgtctgttcttctgtgtattgatgactttcctgcccctgtgacttcaaatgggacataaacaacttgagagggggacagttttgggctcgtgtattctgctcaacatagtggggaagacacgatgggctccatagcagcacatggcagtagataagaaggagaaagagtaccagaacccagaacgaagctatagcccacctctgccagctagcccacacctccatattctccagactagtaccaccgtttaggagcaaggcatgagcctacaggataattcagatttgagccacagctctctattttcctcaccatatgggtactcacatgactggtttgggctttccttgagttaagcttctgataccatttggccagaatataaccttgtctattccccattgcactcatgttatgtgtgctcttagctctactttcctgaagaggaaatgcagatgagatggattacataacttggacttacttgtttggctgatggagacacagccaaagaccagtctgtatagttctttagtggcttcataagaatttgctctaatttggtcatattatcctttcccaaacttaattccacagtttgctttccctggaccgcctaaagtatttgtagggtcagggacctcaactttgaggtcacccaggtcagacaggttccttagtctccacatctgattccattctcaagacctccagcagcctgtggtcttattaactatcattagattggcacatctaatgctccaggaggttctacccagccaaaaccatacaggaagcaaagaatcagatatacaactatgttgatgcaagactagaggaaccccagactccagcaaggggtgggtggtctctccaggccaaatgtgagctattcctggctgcactagtggatgcagatgtgtgagcagcagccagggcaggcctctctgtcagactgtcttctttcctctcccacagtcttccccagtgtgggctggctactctgtcaccttgaccccaagctttccttgccaagaattagcttgcagagagtctccccacccccctccagacattcagtactgtcaaacatcttatgccggttggtctctgtggggagaaaacaggaaatgagtctaattaaaaccattgcactgaggaggaattcatgatgacaacagcaatgcgatctgagggaaacggtggataaaaacagcaaacaaacagtaggctacgagtctttggggcatttgacttcacagtatcttcagttatgaaagctgtacttgtcacaaaagcacactgttgagtccctgagctacaggatgccagctccctgccttccctgtgccatggcaggctacatttccttgtcgtggtgatggcttcagaccttcactctatcacaccatgctctttcagactaatcttcacgaaatcagccaacaaaggcagtgatggttagtgacagtgtgaagaacccttcctgtcagaactgctgataatctacttccatgaccaattacctgttcttcttgctgtcacaaaatgccagaagctgggtactttgttagaaaagaggtgtgttttggtcatggttctagaagctaagagtccaaacagcattgtgcccactctaacaaggggccctctgacttcatcacacaatagtggattgtacaatagtggagcatgtgcacagggaaggtcacacatggaatggggaggggttcaccttgttctttcatgataaccctctcattagaactcactgaggcaccacagaacctaacaatctcttctgaggattaatcacccactatgttctatcttacattgccacactcaagggacacattcaaaccatttcaaaaggaagtaccagggaggtggtcacattggtaacaagggacacagaacacccaggtttctggccttcaagtctacagatcctctctgctaacccacacttgggtgtgtgaaatagcagctgatcagctctcttcttcatcctaagttagctcctaaagagctgccttggtcaacggctgctgctcaagttgattctgtggtgtgtgtgtgtgtgtgtgtgtgtgtgtgtgtgtgtgtgtatacaaggaagatgaactgtggcttctcctccttctcaacttggtccaagaacctgggtttagtccttcctgatgaaaagtttctgtgccctgataagccactctgctgatgcagcaatataaatcagaccaaatgaaactgaattagaaaaatcccaggtttaatggataaaatgctcctggatgattccccctccccacccccagagaggagacaggaagagagaccaaaaacaggtgtctttttttttttcgggtggcagcttaaatacccctggaagtggtcttgagcatctctgggggaggggatcatcatttggcaagctttctgagactctgaagggtttggagagagatagatgagggggcttccaccagaacacccatgactctctactgaagctgagtttattggctacctgaatgagtagtgtgtctcctgtcctgattcccatggctatgaacttggttcacccctctgtgttttccttgtgctctgccaagaatctgtgctcccatgtttattggtctcccttgacgtccccctcctttaatctcctaacagagacagacatcatccttcatccatactgaaacatcttcagaataaaaatggggtcacaggtgggtccaccaggtagtatatgaactgaccattgttagcctctgtcctggtctcctctgccctgcttctcagacagtagtctctgttctattctttagcaaacatcggccctttctctccatgtctttgccaggctgcttattctgacagaacctcactctctagctcattctctcatgttcacacccacctcctggcaaataacttctttttagtcttcaacgcccagcttgtacaccatccccctgctgccattagctcagggccccatgctaaatgttgagatagccctgtgcttttctttgtgttgaaaaccttactgtagaagtgacttgataattatttttacatggtgacttattgtctatgttctcaatagaccaacagagagctgcattgtgaacaatctgcagggattggtgtggttgtgtgcatgtattgtaaacactgctctggagacagttagctgacacccctgtagctgtagcatctaatcatttgcatgtggaaagccaccaccagggagtataagcccattgtgatagaaacccctacagtgggggggttctgtaatacaaaatgctcattggatgaatacacagacgtgaatatcaattacaaagtcctcttaaaggatgggggtagggaaggtgtgtgtgtgtttcactagtgaacctttgagaacagatttgaagggcagcaagtgagaaagtagaaagccatctgccatttctcttctttatctgtacattccctactccttccccagaagtgctaatagtgcctcccattcttagctacccaaagctgtgtaacaagtcctcagaaactcagtaccctaaagcaatttgtgcttttgagagctaggagtgtggacacagctgatccaggcccctggcattaaagcctcacgggagctcttttgtatcagaggcccgagtaaacaaggttccaagcttccccaggttggcaatgcaaccaatttttttttttttttttgtagagatggctctcatggtggtctgctacatcacaataagcaacctagagagaagactctgaataagctgagtgctatactctcatggactcacagacacacagatgcacataacctcacctctgcttccaggaaagggtttaaacaattacagagaaccactagcaatgatgagtacaattcaggggtaaggaatgcagaatgtagggatcatgaactaatttaaagtctgcctacccaacctataagacatgggcattcgaatgggtaccattttctgacaacatacctttctgggaagtttcataagccaaaccaaacaacaagagtcatttagtagcaaggacctgtagtagagaagtggtgatccaggcaggaagtgacacagcaaggagacnnnnnnnnnnnnnnnnnnnnnnnnnnnnnnnnnnnnnnnnnnnnnnnnnnnnnnnnnnnnnnnnnnnnnnnnnnnnnnngctcttcctccagcggcgcaatgtgatccaccagcaagagagggtaccagcagaaggcatcctctataagataagtcttataaaatatatagatttatgataattaagactgagctagcagatgagaaattctagtcattggccaagcagctttgtacctaatatgtctctgtattattttgtccatccatgcagcgggcagaactcaggtggctggcggagactgcccatgtggcggtagggcttgggtggctttggtggaaagatttatcttaacaaggacccacacacatctgtctgcatttgttagttctgtgttgttgaggaaaaaggagccaaagtaagctaagaggagagggctcctgctgacaggaacaaggaagaagtgtgtgtgtgtgtgtgtgtgtgtgtgtgtgtgagagagagagagagagagagagagagagagagagagagagagagagagagactagcaccaaactctgcaagtgtcagactatccccaacatttgggtcctgccagggtatatgtgccatacttctttagctccaatgcttctccagttccaggagatgcttaaaatcaagtttctcccatagctgacctcaggaggcctcagtctggattatgctctgttactgttgccatcttccagggtgccttggagtaccaaaccctccttgtccaaagtaggtccaaggactgggcagcagattcctcaggcctgtgacttcatccccatggggcagagagttccttagaaatttttcctccctgagcaagacagctggactctgtctcctctacctgccttgtggcctcaagacaagggctcctgagggaaggctgacacataggccatgcagaaaaggctctccagtgttctgctctggtcccaggaagctctaagttggttctcttaaagagatctcttggtctgccatttaggaaacctgctacaaagttgatgggtaacaccaaaagctagataagcctagacaagggcttccttcgacagtctttacttctgataacctgatagattttggaatctcactctcttaatacggggtcatttccagggactccctttgcccactattggtctcactatattctcactgtccacaggtgttggtgtgcatgtctcaacttctagagggacagttctaggacagggctcccactccaataaatccacatctcctctccaaatacccaatccacagcacacggagaaaaatcacttgttaatcaaatattccacatcccaatgagttgtgtaaactagataagatattgaaactatgacccccagtttgtccatcatccttaacaagactttcaagttcactttgaaccttcttgtctaagcagagggtactaaggcaattgagagagcagacaaagggagaacgctttttaaccttttaaaagagaacaagatactttcaagttctttagaagagcctatttttatacagatgaggtcattcaaataactctggagccagctgccaccaggcaagggctttggacgttcccattgcaatcccctctgaccctccacacacacccacttggaaagccccttctctggcaaagcgctgcccttgaagtatgtaacttcaaaggggccacgggctgctggaaaaccttcagatctcttatctgagaaaccagcaaatgaatctgatgacatgaggaaagcctgaaattgaaggagcaggtccctcagcagggcctttgcttctgggactaacctctaaaggacactgctgttggtcccacctggtgtggtgatgtagtgaggaacatcaggagagggctagcaggtctgagcctaagtgtccctgtcttctgtcagttctttgtatgactcggagcaattagcctgttctctctgaccttcagtctctgccttgatctgcctttgctgctgacagtcacattataaagagaaggaggcaatgagttcatgggtaggaactgtaaaaagatgtagagatgttagttctgtatttcaaagtaccccatcagtcactttgtgacttacagagcatagactatttcctacaagctagtacaggtcataggaattttgtaaaattatgttggttcaattatggaatcaactacctatctgattaccaggttctatgcaggcacactaggaagcaacctggtgcaaaaattaatggtttgtcatttgaggtagctaggctggatctgaatcacggttttataatctaccatctagggatctgaagcagacacttcacctttcacagcctcggcatcttaatctttaaagtaaatgaatgtctttatgttctaacccctgaggtggttgtatttggagctggagcctctgggagtacttaaggttagatgtggtcatgagggtggagctctcatgacaggattagtgcccttcgatgaaaagagacactaggaagtttgctcttgcttgctctctttcttctgtgagaacacagcaagcagaaagtaactactgctgcaagcagagtgaatgttcctgcttctctgtttccccttcagagaaatccagaagacaccggggcctggtacttacagagccctagtaatgacaccgaatacaatgtgggggggtggtatctgtgaagagtgaggtgggtgacatgcagttcaatgaccaacaaatctgccttcttgctcttaatattagctgaagggtaatattaagtatatgagattctggttattgttttaatttatagaagatagctgacacaatgctgctgtatagcctggttcagttagtggcagatttcactcattgcatttgatatcctgtcaccaaacactttatgttccaggcactcccaaattatttatgcagtgctgtttcttccttttgtctgctcagtggttgtgtacctcaaaacagaagggatgtcaggatgctgggtccagaattcagcccttgataatgtagcacccacctggctgcccagaggaatggtctcttttctctctaccatgaagcccaggcagtcacagagaagttaccttaaattcccagaacacccactcttcagtgcttcttgagaccctcccactgtccatttatgaaatcatcctgcaattcaggaccagctcatcatcccagtgtcccttctcttctggaaccttagaaccaagctccctgacagaatgaagcccctcctccagtggtttctcatcaatcccaagagcactgtgattcttttacagcacactgaaggctggtggcatcctctcctactgctaggaaggcaggttctggttgccatctcaggaacacagcatccttggggaaaagaggagccagccaatgaggcagaagcagttggaatctgaaaaacctaggtcttagaagggtctttgtcttttctcatctgggggtttgacaaccaaaatacagctttgcctaagttttccctctgctgaactgagaaaataaataccaccatctcttaaagtcatttcaacaatgaaactagacaatccatatcaacagttggtggcaacagggggttgtcatgcaaggctgacctttgccttctgtgtaacaccttggcttagtgaggcccatcagatgccaggcctagagccaggcaaagaaactagatgggggaacgttcaacttgtctgctatgtcagcttttgtcacctactctttgtttctttcttatgttataactggtttaaatagtagaagccaagcgagacatggaagtgcatgccagtaatcacagcacttgagagtctgggggaggggtgtcgctgtgtggttgaagtcagcctggtctacaaactgagattcaggccagcttgtgttattgacccttgggctgctgcaccagcttctgcatggtccagtcttggaaaagacagacttggttggccttggcctgacacattcccctttcttccttcacttttctctctttaactttcctttcattttttcattctttcaactcaagagttgaaatccatgtgtgaaatcggacagtctgaggacagacattggctccacagcagaatgactaggcaacatcagacaacttatttaaggcattaggccttctcctgtgttcccttcctggaccctgtaagacctgctaagacccggatggagttacagagacaagacacctgcagtcagctgctggagaccaatccagaggcgtctgggagctgactgctaaattctcaggctagtcacaagccagatctggagtctctggtggatcatatgagccttggtgagattgtttccccacagaaactggcaagctttctcctgcactgaagctggtcgttaaatacttgccaattgccactattgtctggtcctggccatctttcagcacacccccttcaattctccaaaagagtaaacatagtgagaccacaggcttttggagtttctggagatgccacaggaagtcaacatattcagctaatgaacccaaaagaaggaaggaatgtgtgaatgggagatattccaataaaatgaatgggcatttccaagcagaaagctcaggggagatatcctgtgaactggaagacagcatctttattggtttttttttttcagtagaataaaataatccttcccttgacttgcctttgggtttactatttgacaaagaacaatgagatatgagatgtaaattcatttcaggtaattcttgattttattttactttgtgttttctacttattcatttaaactaagagttgatttctctgggtatgagcatggctttgagccacagaaaccagaaggacagtggttttgaaaggtaaaccttttctccgtgtcatgtgaccaaatctagagctggtcacatgacacggagaaaaaaaaaaaaaacgtgattcgaggactctagcggcttttgtttccttctagccatggctcagggcacatatccttaatatcacccatggtccaagacacaaaccagctgtacacagagagctgggaagtgaagaaagaggtgtctctgcccctccagagattttctagaagctgacccagcagcccctgcttggacatattaaccaccctcagctgcaagagaagcagagaaacagccttgaaggctgaacattgctgccctacataactcagacctcagctatggagagtcagcatgtgttctccgcccaaatgcctgtgtgtggagtagagagaagatgagaatgtgtgatgggggaagtacttctgtgtatgtttatcttattgattattaaataaaataatgtttggccaatgagacagcaagtaaatgggactaggagtcaaagaggattctgggaaatgtagtagagaagtgtgatccaggtagaaagtgacatagcaaggagactcatatttaagaaaaggagaaacaggaagcgtccttttttcctgtttgcctcctccagcagcaggatgtgagccaccggcaaggagggacaccaataaggcgtccaataagtaagtcttataaaatatatagatgtatgataattaagactgagctaacagatgaggaatcctagtcattggccaagcagctttgaacctaatacaagtttctgtgtattcatttgggcctaactcgggcggcagctggcgtaaagctcacacgtggccgtggggctcaggcggcttttgacggaaagatttatcataacaaacgtgtgtgtgtgtgtgtgtgtgtgtgtgtgtgtgtgtgtgtgtgtgtgtgtgtaacatgagtatgtttcaacatagaaataaaccaggatatgctgtaacctcaaaggatgtgcagtcttgacagcaaaatacatgtacacatgcacacacagccaaatgcacaagagcctatgagaagttaattaaataaatgaattaaagaagtacaaacaaacagccatgcagacagtgtgataattcaaattgacagcatctcagagcattttatgtgtaacctctatacctgatttttttctgtttagacttgtgtatatgcatgtctgtatgctattaatttttgcaaaggtagaaggaaatgggatataaaatgaggaaaccttttccagtttctactcttcttgctcctgctctgttacatcaaattaatgaaaaattattccaatgctcttacatgtatatgtattatagatgtattattctttgcacctttcttttaaaacaagaatctgggttgacacaaagattccaggattttctaccaactctatcagctgtgaaaattaccccatctgtagaaagagatatgacaacacctacctcagctagactaactgggttgtatacattaactctagaaaggtaccaggcatacatatagtatgagacaatgggtttttcctatgattgttgctatagagaagtaagttgaattcatgatagaaacaagtcagaaactgtatattaagccgctacagcatcctccttgttgccatatgcctcccttcgtattacttactgtaagcttgggtaatgttgcataaccacagggtagtcattaggtcaaatagactgtctaaggcagtacctgtcacaggaaggtattaattattgttttcttttccaataccacagaaccagtcctttttatttttatttatttatttatttattttgagaaagggtgtctattacatagctttagttgtctgaaactggcatgtagatcaaactggcctcaaactcagagatacacctgtctctacccccttcaagtgctgagattagaagcatgcaccagcacacctggcttcaggaccagccctgtaacttctccctgatatttagggacatatgactcctactttcattgtaggccaacagtgtcaggcactctaactccccttcaagtccaacaccaccagtggagggctttgatttgatggcaaacaaacgagtgcacatttgatgaaaagcaaagcaaagctcagctggaagacaatggataagagcaggagtaggaagcaggctagtgtgtggaattcagctttttattatctttaaccagaatgtatctcaactcacttgcctcttataaaccccgagagttggataccttctgtgattatcaaaagccacctaatctagaaagcgattgctctggggttgttggtgtcatgcttaggttatgtgtcagcaagggatttagaaagtgattccctttgaatcttttgctggaaaagaattttcagcaaccccatggtgggctttataatttggtatttggagcccatctaatttcttgagagaggtttggtgtctagtttgtactagtgttggtccctctcaggcagaaagagggcaatcccctccaccaccctccaagacaagctgaaaagctccaaactctcagatttgggagagcctactgtgcagctactgacaccttccccagacctatgagctctgaccagaaatgtcatccatcaccacagtgtcatagcaaccatgacagcacagccagtcactgtgaattggcaaggagtaaacagttgaacacactatgacattcagtcttcctaaaagttgattgaagtatgcaatcttattatcataatttttcaaacaacaaagctgaggctcagagaggttgaaccaaccacccacccgattagttaaattccagagtgaggatttgatcttgggataggacttattgatcattagatgttgtctgaataatgctatcaccaaaactggtcacctcccattggctagaattacttgttagcttgatgtgaagttaattttcagagaaaggaaggagagagagagaaagagagagagagagagagagagagagagagagagagagagagacagagagacagagagacagagagacagagagagagagagagcccagggtgtctatgaggctaatatggatggcagctgggctcatgttgagggccctgaggccagagagaacatataaggtcactgggcaataataaggacagggaggtgcaggtatctgtttatttttgctatatgcaaataggatctacccctggaccttgcaattctctccaaaatctcaatttcaagggttctatgattcctgtaccagatatgaagagaatggtgagatcaagggagaccatgctttctgtcatcaggcagctcacactcaggtactcaaagatatacactgcacagattcctaccaatgactgtgaagtcacagtggggacatgagagggtttcaaaggggaggtacacaatggcacaaggtggaaatttgaatttttggctctgtctcaatttcaaaggctttggaagcaattgttatttaccaggatctgttggtgactcaagaacctctaggcaaactagattagtccctagccctagaaatgaaaaatgtctacctaccgtgtgactgcttgccttggatacaggctcaggctgaggccacacggaaatactcaagaggcctgtaacaagagaaatcaagactggggccaactgtgcctatacacacagctgcttcaatgtccaagtaacctgatcttgtcttacatgcttttggtggcaggcagaagagaaacaatggctagaaatcacacaaatttgcctgaccttgcctgtgtggactagattatctaattccacaacacctgcacccaaataatttcaggcagtgtctgacagcacagagccttctacagatgatgcatgtctctaatcctgtaatttaaaatcctatcaaaaaagccagaggattgggagaaattatgttgaacagtgcaaatgcttccagatgagaactttaagtcaatttgtggatgaactgtttacaaagctccaaaagcacaggaagcttgagcttctctgggctcccacaatgcttccccccaccctgtcccccaggcccttggcatgtttgtacatccatgattttacttctttcccctccactatgtagctctcctacaactcacactgatgcccctatactcttcagcatctcttggattttccttccactgtatatatatggcacatggtatgggaaggtatcctctccagtatgtaccgtgtaaatgttctctggtggtgaacaatggcatcagcactgcttctgtctgtggaccactgagtcctgattctcactggaaacgttattttcttcatctgccatctcatccatctcatccttgctgccagtttttacttgactatcatacatgtcttgccttaaaaatcccaggtcttttaaccacttgaaactccactttgttagctaagagtccctaaacacccacttctttgatgatgattttagcaccaactctttccatttccatgcatgttatcagttctggaagcatcaatattcatggatccatgcaggaaactcatgcatctcaccagccacctcattctcaagttcctgattccaatgatctatttgatctattcctttaacccactcacctcatttacacaacctcatcattgcaccattgactttgttgtgatctacccatcctcaatttccagggttgttctgtgtgaacagtagctctttcacatccagctcactttctctaaatacttttatcataaaaattccctgacctcctctgatgacaagtgcaagagagtgaccatcggtgaccatttgccctcctttcctgctggactagaggggaatttgcggaactcattcctttaaaagacatttaataggccatggagacagctctttctggacaggtcttgctgtgtaaacataaggcacagtcttgcaattccagtgctgggaaggcagggataagtgtattcctgggctttgccagccagctagcctagcctgcttggcaagctctaggccaatgagagaccttgtttcagaaaaaaaacaaaaaaaaaacaaaaaaaaacaaggtgaataactcatgtaaaacaacaaccaaggttgatttctggcctccacatttgtgtgtacacacacacacaaacacacacacacacacacacacacacacacacacacacacacacacacaaacacacacaccatgccactaaatcagctcactttcatagtatggaaccaactgggctaacttgaaacctaattaagccccactgtgacctattatggacttgcaattcacatagctgaatgtttcaacaacaataataaccacaaagcataacttgatcacaaacctcacagccaccagagcagacaacgtgcaagttgtcacacttcaaagctgttttccacttgatcttctcgcctcaaattccatgcacctgtgcccttccacccttgaccttgcattatatttcactaaaaaaaagcaggcactagacaaagaactcccttttctctccatctccaaaggcccaatctgcctgtaccagagatgctgttctcctcgctggtgtgggggaaggcttggtgcctctagtgaaggtgagaactctgtctgatctcaccctcctctttctcctagaatctgttcccttcatcaccttccttcttttccatgtcagtggttccctctctactaacatctgatcagcatgcatgcacatgtcctcatctttaggaacagaagctcaacatcgaatctccttctttacacaacaaactctctgaacagtaactgtggccagtgcccctttccagcatcccctctgccccctgcagtgggcttgcaaccattccctctgaaccaagcccctctactgagatcaacagcacagtgtagttgattccactgtctgttgtgttctccacatcagaagtacttgatgtggtggctggcgattgcctctcaaatcattcccttctcttgccttctgtgtctccaccctaaatggttctactatgatcgatttgtaaacactatgctgaagggaactcagggaacaagggaacaatttggccttgtctctctctggaaactttctttattctttgttgttgttttctttctttcgagacaggttcttatatagctcaggttgccctcaaactcaatatgtagctgagactggtcttgaatttgtgatcctccagcctccacctcccatgtccttacacacccagcactgtcctgccactttcttataagataacctttagaccactatggctgccaagaaattgagtaattgaactgtatttctccagattgggacatactgtatgcatgcaaactcacacaacacacacacacacacacacacacacacacacacacacacacacctaagttttaaaaagtaaactatttcaaatagtgttaaaataattacacataatttgttgtattatgaaatcagagttaaatacattattcaaattaatctcctgtggttcattttactgtttgaatgactgtcttttcttagtgtagttactagaaagttttaatagcatttagatcccatgggattagtattccacttttgtnnnnnnnnnnnnnnnnnnnnnnnnnnnnnnnnnnnnnnnnnnnnnnnnnnnnnnnnnnnnnnnnnnatcccagctgctgtctgcagagggatagatggcttaaaagatgactgtttaaaagacaaaagattcatgaagtctgaagagaacaaagagtaatcgaagccatccagaatcttatattctgcctcaaagactctccagaaactctggtcttttaaacactcacaggtttcctgaaaagtgggcccaactttgtctcttatcctgcaaaaggcactctgtgcatccctttaaggccacatctgccttcagtgttgactgagtggcctgaaattcagatgacacactaaggagtaggacttagacctgacctaaggaaaattcatctacaattttttctttcagagaagaaggtttgaaacaaagcctcaagtagcccagggtggcctcaaactccatatgtagtttgagggtagccttgaattcctaatcctcctgcctgagctccagagtgcttagactataagccaccacatctgacctgatttcctaagtagacagaagtcagagtgacaaccaaagaagacaaatgaaaccctgaaaactcaaaacagacttgataatttctatattctaagacatgagaacacaaagggaatgtgtcttccttggagcccttatcctttctcagatctggtttccaggtctgcctaacccaacaccatctttccactaattccccagagtttttttttcatttagatcctaacctgggatttttcagtgaaagtatcccaagactcagacattttatcttactcgttttcttgtttattttgcattaatttctttaactgttttttaatctccacaatagtgtgaagtgtatagtaacaaagaggcaaacatcaggctttgcgcttacggagattataatctaggagggaagcaatgtttgaaaccatgtggcctgtgatgtagatcactgaaatgctgtaacagaaaacagtggggtaggaatgatgttaacctttttttccttatcatcaatttcatcacataaatttgcctgttgtaagaagataaaccatacatgaggaaaaggtttgtcaactcctcacctctttgcttccaaggagaacctgagatacaaattccatgaagtagcagctggcatccaagggacagaaggaaattttaaaagaacaaagtacaacacaaacagaaaagagaaagtgaagcaaaatgtgccagcattgagttgctgttattaagtaagtctgaaataagttctaaggtcaatgccatggtggaggccggtaccacacacaggatcttcttgagatgatgaaacacatcacaatctgcataatatttgaaaaagaaacaacacacccagaaatgtactcatctcatctgcatttttaaaactttaaagttatagttttgtgttcttttagagaaatctataattacctgaaggcaacagcaatatttttctagaaaccatatagctcttcttcctgatttgtgtctgtctactgcaaaagtctccccaatagaatgagatagtccaatttaattcattagagcagtgagacattttatgtctacacattctttgttaccccttaaacttgacctgcattagaaagcccattggcctagtatttcaggatatgcttttgttggcatgataaaacatttatactctgtattaatattttattctaatttaatagaatccatcaagcatttttatctcatgaaatgagagataaaatctgcatgttttttttccttgaggacctttagttaatttatcttctttgaacacaatgttgaaacaatttcctacttggctacagtttatggccagtgacatatttacttattcaatcctctttctccttattattagtgatgaccaccagtgttgatcagccctgcctgctgtctcttgctgaattaatgctccttgatgatgttcctaccttggtggattaatgtaaactcttttctgcttacacaatagaaacaactgtttacttgtacacttcttttttttttttgatgcaaactgcacgaggctttattgttgttttaatgagctaaccccatgttagctcgggtctttcatccacccaccatggcggatggctagaaaagacagctcaaagagtctgcatagagatcttatagggcagcataaggggagtgtctagggatatgcacagtcagatgcctgccttgtggcaaggaaccaatcagaagttggctggtggtgctatgctttacagctctgggtgtgcttttcggacaagtgcactgcaatgacgcacagagcatagcaaccaccctgggaggacctatgggacataacaaccagttgaccaatcaacacagggcaagccctccaagcctggaggcatacttgtacacttcttgaacaaccatccaacataagatagattatatacatagtaaactagttatagtgcatacattgtcttgtaaattgacacctttttttttatttcagtgtcaatcctgatgactttggaaatgccctgatgtgttctgatacagttaatttatgactgggacctagcaaacttgtgatggcacttgcaaattcaagtgatctagttatggttctagtcccttgtgtgtaaagtaccagtatgtaagtcctacctttctcactgggcttcttaaagaaggaaagtaaattgccctatgctgcaaacacaaaggcaaagactatagaaggcagtgatgaaatttctttctggtaaacatcccaatagggtacaaggccaccataggcccttgaaggcactgaacctaaatgccaaggctccaatcaaaggagccaggtttgtgctcttggggcagggaatgtgggggctgatgcttttgcccaaatatctaggctggagctgcctggtcttacaccatttttccagaaccttaggatagcgcaaggtgtgcatgtgtgtgagtgtgtgtgtgcatgtgtgtgtgtgagtgtgtgtgtgtgtgtgtgtgtgtgtgtgtgtgtgtgtgtgtattggaggtgtcaagacatgttgccgaagaattactacacaagaccccaaatcttccattgccttcccttttcattgagagtgaaagctaacttgtttgcagtgtctgctatggctgagcacactctggtctggttccctaggacttcatatcttctctggtccctaatcatttgggctccagccatctgtgctcctgtgctattccttgaatgttccaggcatgctccagtgtgagtctcagcactgcccttcatgtgtttggaagacttgcatccagacagccacaggcttccagtctttacacagatgtcattttcataaatacatgttggccactctgaagctgcaccaaagctccacttttctgcattcttgccacttggttctgctgagtaggtcctgcagatttcctgtccatagcccttcagtctgcctttagctcctctctgcagctgtgatggacagcaatgcacaagttggcagctatccctgttaggcatcttatgtccgttttgattcctggttgtgttctctagaattgaagtctattgagcttgctcagccttttgggggcagtttgaaggtcacccttcactaattgccaaaggagctaggggagctgttccctgtttccccccccccgggggggggctgtcctacaaagatgcatttcatagggttttacagtgtgtctccagccctgttgacaacaacaggaaatcaatcattaactcatgggctcttctcccttacctttccagttcctgttccctctgtgtgctttctggtttatggacaccaaaactctgatttcaggatctcctttttggtgaatccaacccataccaggacatggcttggcttctttttatttcataacacttaccattctctaatgtggtgtttgcatgagaatgccccttaggctcatgtacttgaacacctgctccccagttggtagcactgtttggggaggttatggagaggtgtaaccttgctggagaaacagcacagtggtgggctttgagaggtgatggcctcatccacttccaagtggcaatctgctgcattgtgcagttgaagatgttatagctcaccttcctgctctgattccttacttcctgtcttccccagcattgaggactctccctttgaactgtaagccaagaataaaggtttcttttctttttttatttatagaactttattagaaaacagaaaaggatataaataaattatgaaagtttatagctatagcatactgaagacaatgtaacaaaatagcatttaaagtgacaaataagtaacaattttcttttatgtttctcttatatttataacaaatatattcatgtctgtgcctgcattttcattcctattgtataatctgtatcacacaccatttctttcctactgaacaattatatttcctaatgttttacaaagtctgtcctttcacttacaggatctagaaattataggagataagaagagcatagctgtcagatctcttaggttgtttgtccctaagcagaaacacacacacacacacacacacacacacacacacacacacacacacacacctgtttcataggaagcctggctactgactaggaagagaaagtttgattcctgtgacatagtgtaagtcaagtgtatctctgtcctctaccttgtcacattgtataggccgaataataagtgtttgcttcctcatggtgaccttgatatattttatgacatttgaacaaactgctctgcagaagcaagtttcacgttcaaattacttcatataacatatttttgaataatattaccaggataaaggtttcttttctaagttgtttttagtcatggtgttttataacagtaaggaaaagtaactaatagacatactgagttaatttctttctttccttattgcttatgtatcccctccaaaacataagccttattctgatattgacataataagaaaatatgtatttagcttttatcctgtgtttctgataaacaagactttcaaagacccctggcctctctggagtgatgagtgactttttgcttgtgtgataacttatggatggggcaggaggtctggtctttagactgcttcaggatggaagctggttgccagtataccaaggcaggatgaagaacctggaccctggagcaagacagattgagttaatcatcaactgctaataatttaatcagtcatactgtcataatggaatcaccacaaaaaccctagatactgccagtttgtgaccttccatattggggtgtgtgtgtgtgtgtgtgtgtgtatgtgtgtgtgtgtgtgtgtgtgtatacagaaaggtgatgtttcccagctccacaaggacataagcacctgtgctcaggaatcttccagaccccactggatgtacctcttgctgcagctgctcatctatgtcttttagagcatccttatagtagacaggtaaacataagccaagagtttccctgagtcctgtgagccctgtttggctatgtgactgatatgtagggttgagagcagtctgtgaagttgggcacctaccccatggggtctgcactaattccaggtaagtaatttaaatttgagttgttttgtaggataataagtttgcataaaattagaggacagatcagtgtggaaagcccgaatagtgatagaagtgctgtgattggaggaatgggttacttttatcatgaagatggagacttttgctcatttttccacggacatattttaaacatgtatcacagggcccaataagttctcatagaacactgtcaacagaattaatgaaataatagagcttgatgtccttgtcctttcaggattttataatataacaatgcaaacaaggaggcttataaactaatgctttcaaaagttggaaaattgaagatcttagtacagacaaatttgatgcctggtgaggctcggcttcctcacagatgtccatcttccctggaacctcatgtggtagatggtgctatgggtcttttaagggtctcttttagaaaggcactacccccactggtgagagctctaactccctgacttggtcatctgccaaacacctcactcaccacacaatacccctaactctgttcagaagccttttccttccatggccccagtcctctcagaattgccacctcaacatctattcttactttcccatccagtaactctctgactctattcctgggatactttcctgatgctccggaaacatctggccaccagagagctaaacaaatgaaccatacaccttactaagagaattcttgtgagtgttgtaatccttgctcctcagccacagtttaatcatctctgagtggatcaatttgccaatgcagagttctgcacagaaaaagaggagttgcatcttaattgagcatgctagctttaggatcaggaagaacagtctttccactctgcccagtgttagctatgggtctgaaagcaattccctgtgaggaggagatgttgtatctatcaaggctggtaactagaatcttgatccacgctaaagtcactgtcttaacaaccactatatcttccccatggttcctctacctcacctcatggcatcctctaagcagctgcaccctcctgatcacatagggtgagtaggccaatggtgtgtgacatggctctcacatcctgcttgtcttgaagtcccattgtgtattgaagccatgcttcctatgcctgctccctccattcatcaaatctacacacagtttcatacatacacgcactaacatcgttcttggttgtctgggcagataatccatgctcccctggaaaacaaagacacttggcatgaacatgaaagatggacacttgatggcaaacagaagagtttgcctttgtttacctgttggctttactacctcttgcctctgtactaacactgagttagggagtagatgatgttcacaaacccgcactggctccctctggcaccagaaagaatgcataattcagtcgtgtctcattatatgatgctgaacaaatgacagttctcctagaacccatgaggtcctgaatgaaggctgaacacagaagcatcacttttgactctgaggattcgacacacaacagggaaaaagcagcctgtagttctgctgttaggaagccaccatcagtatcagagtccaaaggcagaggtggcaaagcctgagacagtttgttcctttctcagagcctgctgcacagctgggccttggatattcagtaaacaaagcaggtaaggctttactctccagaagtctgattctctctatcaattcaaatgggctcagagttaccatggaaacatgcccctaggtgtccctctggaggaattttcagaaatatttaactaagaaggaaagaacaccaactctcgtgtttccatgcttccagcctgtggaggcaatgtgaccagcagcctcgtgctcctgccatgccaccgtccccaccatgctgaactgaacaatcaaactgtgagccaaataaaccctttcttacataagttacaattgtcaggtgtcctggtatgggaacaagaaacgtaactccagcagtctgtaaagttcacagccttaaaaagttgggaggaatttaaatgcttaaaggcagaagacagcatcatggcagagctgcttatagtatcccaggcaagccccaggacagaggtggtggaaggcaaaggaataattgcacacccacagagacactggcaggatcaactgaggacacacaggcagctcttttgctctaagtggctcctttgtcttcatttctacctatgagagaatggtttctttcttgcagattcaaatttccagcttggtttttatcttccttatcatatctaatttatgataactgcttaaagcaaacctttggcattcaacatgcagccagccatagtggaagtggctcccctgggaactggctgacctggacagagtctgtgagtgccagagcatgacaatgaggggagggatgttcacccaggcactagaacccaaagcaggtgcagtagcctggaactttctcagccagacaattgccaaggatgactcaactccattagggtgcactgattaggcagagccttgcatgccaggtgcaccactgggcaggttagtgggaaatcactgtcctagggttccagctgctatctttgccaaagaaccaacaaagagacaaatagaataatgctaataaaattgttccagtatctgaattttatgagcgggaggagagaaagggaaaggcagtactttcgtcaacttagagaagccaggaatgagaaagacagctatgtgatccaggtcaggcaaatatctgcacttggtaggactctgcaaccttctggccacaccatccacctatgcaacacttaagctggggcatcttctaagtatagccagtgtgatctgtgctgggttccttacatgtgtaagccaaaggttagctggaatcagctagatacttcagacctagaaaaagtcagccaggggctgggagatggctcagtaggtaacacacttgcaatgtaagacttgagtttggtctccccagaacccacataaaaaaccaagtgcagcagctcacacttgtaattccacagttgggaaagcaaagacaggaagatccctggtgcttgctgattagtcagtctagccaaatcagagatatccaggtacagtgagaggctgtactacaaaagttaacgtggagagtgactaaggagagatacccaacatcagcctctaacctccacacacatttacacacatacatgcaccatggcatacatgcgtgtaccccacacattgctcacatgtacacacaaaaaatataattttttcaaagaaatataaaatattttaaaaaccagaatggctagtccctatcttgaggaaattcaaagcacgtcaaaattttttggtatttctgctgattcatgatttgtgttactcctaagtgacctcttggtttcaaactagagtaattcagcaataagtaaatccttcatcctcttcctctacttagaagacacaagcaaaataaaatagatcccttcagccctagacatctgttgtcataacaactgtagttctgacaaaccatctaaaaagccagcaacgattttgaattgagcattagtcatctccctccttccgttgaagttcaacctttcaatgctgtaaccatttgccagtgacaatgccccaccatcaactgctttctctcaatattgactgttgactgctattcctcccccttacctccacatattctagaaaaactcagacttgaaaaccttggctatgcataacatcaaatcacaagaaaagagatcctagggtcagggacagaggggctactgagtaatatgagaataccagtctcacggttgccaactcctggcctttggcatgttataggttcaagaaaggggatttgaaatcattggacaataatctaagatatacccatgctttcatttatttattcttccaaataaaaatttcatcaggctggaccccacacctattcaggtttgaatgtaaaatgtctctcaccaccgaatgttttgaacagctggtccctggctggtagaactgttttggaggttgtggaaccgctgggatacaaggcctagctggtaacacagaacactgaggatggctttaagcttgtagcttgaccctgctctgcttaaagccaccccttctgctaccatgtcttcattgccccaatggtgtttatgtctcagtggtatctaaacccttcctctctgaaacttcctctttagggtattttgtcctaacaaagtagactgactaaaacacactccctgctctttgccctgataatagtgatgaggcaaatgaatcactcagactcagcatcaagaaatatgaagctggagaaagaaaggaccagccgaccctccacaagcatgtgccacatgccaaactccatactgtcaccggtaagggatgccaagggcctgctgtggagctattttctccacatcgaagcatcctgtcctacagagaagagagtggttcataagactgggagagttaacagaacttacatggctctagaagtcagaaagtcatggaactcaagaggccatttccagcattatattacagtaagcacatgctggagctgaggacactttcttcagctcagctgcccagaagttgggcaggaaccttcaggaatgcagctttcacaaattgtcacccccattcaagggtgcactttttagtgatgaagctgcccttaagtcatccaggctgtgtgagcaaccaatcaccctagctcctgtgagtaacccgatgaactccttggttctcagagccagataggtggcactatttgttttgtcacaggtgccctgtgagggataaagagacatttgctcacttctctcagtaacagtcatgcaatggttcttcatgcacgttcctggttttatagttgaaaacactaaaactgtctaaaacaaaagactcttccagtgttttgaggcagttggtgtgtcaaatcaacaccagggagactttcttggttcaccacattctaatagtctctgactcaagaaatgtctgagaagaaactccaagctttaagttttagagaacagtagagtgtttggggcaatttaagcaatgaagaggagtgctttctagaactttaacaatcatacacagtgagggacatccttcacaacacataaggtgaaacttcaaaagtcataccaagtgggggacatccttcacaacacacacatagtagaactttaacaatcataccaagtgaggaacctctctctctctctctctctctctctctctctctccctatgataaaacactctaatacatacagctttaatagagaaacagtttattcagctcacagtccatattgtggggatttcaggcaggaacttaaagctgtcagtcaaatccagcagtaagagacgaaacagaaatgagtgtgtgcatgcccagtactcagctcaccctgtctagtctactatatcccaggactcagctccaggggactgtgctgcccacagtgggcaggtctccttacatcagtcacctaattatgactgtctcccacagacacgcatgcctacaggccaccctgatctagggaatctctcattgaggcttttttcctaggtaattttaggtatgtcacactgacagatgaaattaaccatcacacttcctttatcttttataaatatttataggatataatactaaaattgtattttaggggcaggaattatgacatctttagatctataatttttacaatttcttttttgttattttggttttttgagacagaatttctcccgtagaactggctgtcctggaactcactctgtagaccaggttggcttcgaactcagatatctgcctgcctctgcttcctgagtgctggaattaaaaacatgtaccaatcaccgcctggcaatttttacaattcttaagatagcaataacattaatccaatgtacacaaaacatgctcttatgtttagacatacttttagcaaaactataaaaagatattatctccacttcagataaggaaactgagattctagattattctttaaaatcaagcaaacagtaaataatagggtcaaaatctgaaataatgtctttctaagcatatgctcacaaaattgtgctttgctacatcacacactatacttagcacgaattgttgagcaataaagtcattgttaactcgagttgaaaatcagagctatttaataaataggcaaaaaaaaaaacccaagcataaagctatcaacttccaaaataagataaattcagtccttgttatttctggtgtgtttatcttatttcttcagtctaaggaagagtgcctgggtcctgagtcctggcatacatcatccagtatcatcaagagagacttttagaaaagtgttgtgaacactaattattagggaaatttttattattgatattatccaaggtccataaacacatctggcctttccattgtttactgttgttcgttcttttgcagtgactgttaatccaggtcatgatagagtaccattcgagggtgaactcagaaacaagaatacagagagctgaatggcctcctccatcactaatgaggatgccccaattgtcctcaagtcacacagctaatggagttttcaatacatttcccatctttgagcagctaaagcctttctcttgtcccatccctgccaaggcctgtaccctaagctgcaggctattctctctctgcatttgccacagacactgctgacttcatcagcaactgagaaccagagcacaggtcaaaacaggcaggctggctttgaacttgacttccgtataacactgcagactccacaattttcagacatttcaatttcctgattcaggggtttagtaactgatttaagcagtagaggagaggcctctggcaaaggcagggagtagaagaaaggggaggagtttttctgggatactggggagtttctgcccttgggatggtctagatttccaatgactgtccacccacacagtcggttccccccttcctggtatcctcataatgccaccttgtatttcatcactaaaatgccaagaggtggaccagtggggtaaaggacagggaagtaaccttggtattaatggattttcctaccagcatgctacttctacaataaagcaagagggtcttggaaaagaactccactcaagttggaagagaaaggagaaggaacagaaggggtgaggaagaatagaactaaaagggcatgaaggcagagaagaaaacaatgaagcctaagttcctctttgaacacatattctatgtcaatgacctctgggtgagattgacaatgccgaaaatgtaaccccaaaggcagtggccctgcaatctagtgcaaaagtacagtatcaccaaggccctgacagccagctcctattcagcctttgtaaccaactttacaggccatttcatgtctgcaaactttggtgtcgatctattatatgagatgggagaactaggttttataaggtcacataattgcgttttgtgaaaagtataaagtctaaaaaaatttaaactgcaagggcatagatagaaggcagacaatgtcttacatttgccaccttcatacaactccccagccaccatcacacagggcttaaagggctccaaagaggagtctgaaagcgcctccctagtctgatggtctgtgacagcctaccagcccatcctctgtggtcaacaacctgggtcttacactcaatggagagctcttgtctaagggtgtgttcagagaagctttttgtccagcctcaaccaatttagaaaccaccctggcaaagaaggaaattaggaaatggaccagaaggcaaaagtgtctgtctgtgtctgagatactagaataggcgctccattcgggccctgtggagtcatcatccagaccacacagtgggcgtggtttgttcctctctgtggatactaatgacgttattttagatgtggtctgtgagtatcttacagggatgaataagacaagcaaaccccaaggaaatcaacatctgctaagtggactcatccatcctgagtggtgaaatatctctgggcacaccttggctgagcatgagagtgtgtgtctgtgcagatagttcctgctgcatccctcatggtctctactctgtatctcctcttcccttttgctattgtctccaaataaattctagaaaattctcaaaatatttaacaaacacccaccccaagcacatccttacagagaagctcaaacatgtctacagccaacccttccctgctgtcctgatgaaagtcaccaccatgcctcactccctagaatcagcttatagggatgctcatttgccaccagtggcatccttgtctcctcagcaatgctaaaccaccatggacgcagggagattttgtgtttttctgagccctgtagtctgcatccaacagcagttgctttctcattttctcattgtgaaaactttaacttattctaaattattctgatctgcttcatcctataactagatattaatatctacatcacaagcatgacaatcaaatgaaaagtaaggtatctgaagcatctaggacagtgcctagcctagagcagctgtgagaacctttaaggtaaattacagaaacattaaataatgcctgaggatacatgggaaatttgctgaatggatacttgaaatctattttccctgaccaatatctttattttctcgtgaaagagagattttgggtatgatgtaaagagtaagacagaagacacagtgtgattagtcagaagtacctaggaagataatcatagcagaactacacaggggaacactcttaaggtttggctggagaaagcaagcatatcctggggagagaaaacagccttgaacttactacggcacagatccactgttcttgaatgccaggtgcttgctgttgatctggaaagtgatggagaaaccatgaatgttgtggttaatgacacagaggtctgtctcaagttcagaaatggtgttaggcattgtctaatccagtccctgtttcctgaacccaatatccccttgtattttgttgagtgtacctgtagagtccatgttttctagacatacatctccttccattctcatgagtgtagatgaatcttctaacactatgcagacattctcactctcaaaaaggacaacactgttctgccatgaattcaccagagaggacatttaatggattgtcctgtcaattccctccaatcacaggtccagaatgagcaaagccttaagtgatttgataggatagtatgtaggcctgagttctcattaccaatgaagatgccagtagctgtgagctctgtgacccccatctctgggggtcagctgccctgctggcctcaagaatcttaggagcttatctgttaaagcagctctagagaaactgtgtcccctcaccactaatggtttagagacaaggcaatgatttagaatgatccctaggccattttaaatggtccctagagggaaggcacagtgaactcaagaaatgacgaaattcagaagaccagatgtgagaggctcggtgagatgtgccatcagctagaggatacactgcagtagttagcagggtggtctggcttctgaatcatatgtccttagcactatctcaacagaaacggggaaaatgcccggtgagcttgtcaaggactgtcaagcctcacgcacaactaaatcaatgcaattaaaaggataatggcacacttttaaaacctatcagattggcaaattctcacttgatgatactcatgatgcaaggatgtcagccaagggtcattttcatacactttccatgaaatataacttgatatacccttctggaagatgattcaatgttacctgtcataattaaacaggcatgtgcctatgtacctagtaacttgcttgctagtaactgccctaaagtacagttgtatttgcaagagtctgtctgcacgtatgtgttggcgtatttctggccatagtttatagaagaataacagtagaggcaagtggaacatctgacaatatggaactagttaaacaaattgtagtgcacccatgacataaaattcatggaccaaagagaggggttgaggggtcaggggagagactatggtggctaaaagcagtgtagaagaggggagggtttacagaaagagaatgactgggaagaagctgcagttctccacaagtacttaggggatccacatatgtgtgtgtgaggacaccagccaaggctgggggtagaaccatctgaaaggatgagagaatacactacataatactcacaaagggctggagacaatacctgttccaaccatgaacttgactggaaatcatgcaactcagacaacactggtagaatgttcagaagacacttgaagccggggcatttacccaacactaaatgtagctttggttccacctaacaatctctaaaaaaagattgtaggtaacttgattgcacccatagataacaagtgttacaaaagtaacaaaatacacagcacctgttaaggtgaaagtcacaatgtctgacatttattggtggagtgctgaggagtttgtatgtggtacagtgatgagagtagctgctgagtacccggcactcaaaatgcaggagactataattcaggagagaaatcaatcgactgtgacagatgctgagctggaagagattctagaacaagcaggacacagctataaatcagtgagtacagagacgtgttagccataatcaaaaccagaataagcaaacagggcagaacaatgggactgaatgtacacagcaaatgaaaacttgaaccagtgtgctgctttgcccagctgtttggaagggtcctccaaccaggtattccagtgtcagaggacaactttcaaaatccattctctttctaccatgtgggtcacagctattgagctcagattgtcaggcttggtgaatggtacctttcccattaagccaactctctggtctctagaagagagttttaagtgagttataccatacaagtgggttacaaacaaaaactaataattattaaactaggaactgaggtagaagccacagaagatgcttatgttctcatccaaggggggaacctgatgcagaagggccatgtggtctggaggctcacatcagtggacccaggatagcaacacatggctatggctactccagctgcagtgtgggtgtagataatttgatagtgtcttctttggacgttgtattctttcattttcatgtcaaagttgtcaaaaggaacccatatgtccatttctgcttctgttatttgggccttcttgtgtagtgatatacgtttaggactattacttcaccttggaattaattccaatattgttgcactttttcccctagaaatttcctctgctttgagatctattttatctgttattattatagccattctaaaatttaatattagcagtgtgtatccctttccatcccttaactttaaatgtttctatgccattgtgagtgcagtgagtttcttgcagacagcacatagttgataatcatttaaaatttctcctgtcaatatctgttatcatttaatcagtatttgatatatttatatttaatcagtgtttaaattattgatagtttagggcttacacttcttctgtttttcattcttctctttctcggtctcttcacacctatcaggttacttgaatttttattagaaatatatattttattcatgctgttcttacctatatttttcagcaacatgtttaaattttacatccacataagtaaatttatttttcttaagcgtgtgtgtgtgcgtgcgctcgctcgcgctcatggaggaccaaagaggatgtcatattctttggaactggagttataggcagttatgagcaacccaacatgggttctggaatcaaacttgggtcctctggaggagtaagaagcactcttaaccttgagctatctctctaacccctctacacatattttaaatagaatattatcaactatttctctaattgttggacttcaagacagatgctcttcttttattctggtcattagctatgacttgagaaagtcatgaagagtgatagtcttttagatttaccacaaatttatcagttctactctttttcttcctgaagtctcgggccttccgctggcctttcttttctgggattagaatttcttctagccaatatttaactgtatgactgctggtaataatttttcttagttttcctttctctgagaatttcttcttcatacataaagaatagttccccagatacagtgcatgggaatcagtgtcacagttatcctgtctgactcagagagagcagttaattaagagcagtgaacatagtgtcagaatcaaaggtggtgggttccaatctaggcagataacctgcaacaagttattagtgaaactgtgcaaagagctggactttatggggaaatccactgttgttgcttaattattgtgtcagtgtgaatgtgttgttaatgtgtcaatgacagagagctccttagtagcctgggaacactgtgaggagcaaagatcagttagtggtggcgcatacaaaaacacagcacagcattttgtaccagatgtaagcattcaagagcttctagctctccctaatactgtaggcacagatatgaaccctggtactgacttcttagggcttgaaaggttttgatgaggtgatgcataaacacatcttgcagtgactggcatatgaaaagcattcaaataacattttattcaccttcccctcttctcttctttctaagtgtcttaactagacacataaaggcccatttcacagagctgctgcaaggactggatgtaactattacactagagcttctgcagtttgaggcaagctgaccaaatgtcagttatcttacagcgagcgctgggcccgtccccactccaccctgtttgcacaggcttctcagagtacctgataaattgttataatgacaaacagttgcctgggagctgaaagcagaaacaaataagcctgagaaccagaacatgagacgagtaagtatttaaatgcaacctacacttgttgatgtacattttctctactccagagatcctccttctttcattcatcaaaagatggaccaggcctttggagactggtagaggagggatcagaactcagtagatgtctcccgaggttcctctgagacagtcactcctcaccctgcagtgcttgggtttggcccatcctctctgggaactatgaaaactggcatgtgacaggacagctgttgtggtgaaaggaacttaagatactcctagtcgtgcccattcttgtcctctccaaagcagccatataaaaggtgtgagcagggaggaagaaaggagtgcagacagtcatgacagtggaggagagccacctaagccagggggaaatgaccctatctgcaaatggagtaaagggggcagtgctgagagagctttgtggcccgaggcccagcagagtgctttagtacttcagttgcttctggcttccagatgtgtatcacaattggacttttctaaggaccttggccccaagtattagatctgatcaccctgcctttgaaagcacttccttttgtctttgtaagtagctagctcatttgactgtgcacctacagtgtacctggtgctatgacagatgtgctgagaagaagggatttggggaaaaattgaagtctttgccttccaacaagaacaatgtcttgaggaacttgttcttatgtgtgaaaaggttgtcagcttgtctttctcccatgcagatgttttagcacacaggggacttccaaggggggggggtgacagcccttcgacctggagattccaagtaagtccaagcaacaaaggacagagtgtcctaggacagaagatgatagaatctgaggctttggaagtggcaggtggaccagacttcatagagtcaaaagaagcacgagaggaggagaaaataggtgctggagcccactgcagggacttagggtatctcattagggttctgggatcatcagacttcatcagagaagagcactgaagtgttgagaatgagggagtggccatttcaaacacagtgttaggaaaatctcctctacaggggccgattagctgaaggaatgaggggtgctgcttaaggaactgtccgttatttccagaagagagctggaatcagcatggtggtgtcagtaaagatagggcctatccaagcccgatgctggcagttaagactcagataagagaacaaaggcaccgataacaggtttagaaatacatggccctcagcagagtggtagggattggacagaaggatggaaatcagttgagtgggctaggctgtgtagagggttcttggctcgatcattagcattgcctttcttcccaggggatatagacaaggtatttattcttcccaaatctctgttcttccataaaacaaaggtcagtacacacctcaaagggaggtcgtgggggttaggtgagaaaagaaatatgaacgatctagctgagtggtgggtccactgtggaagctcagtagctgggaatgccctttgcctcttttctgccccagtccagcaaggagcaggcacacagcttcactgtaatgtttcctttcctcacctgtcacagctgatcggtcaccatgcttagagtcgcagggcagtgttttgtgtatctgcctcttgttcttaaatggtccctgactggaaaaaggcaaagcaaatggctttaccaaagaagtttaagaccactgagggtgtgaacttcagggtgggaaaaaaatgcctccaaagcattttctaaaaattcttttggacatttatgttgaaaatgttccacctcagattgatggagaagatacacaaagctgaacttgcaataaggtgttagtggagcgggaagggctttctcgtgagtcagcagaaagggccacggaagtaggatatgaaacagtccttccaataaagccttatgggttaggagagaagaaagcaagtgcacaatggataccgattacaattcatttcaattaaaaaataatttgaacaggagtagaatgatgcaaaaatgtgaatgcactatctgaaatgtggtaaaagcataatcattttcctgcgagtcctggcatacatcatccagtatcatcaagagagacttttagaaaagtgttgtgaacactaattattagggaaatgcttctcatctcggtgaaaacaattggggagtggattagggaacacgtgaccttccagagaaaggttctgcaaagaagacacccttttacagaacaatagcctatccatacctgaggtgtctacaattagccaccctttaccaaagactactttgattgttccatgcttttttccatggcttcaccgcttccaggctaccgagtgctgagtggtgctgctgaagatcgcttgtcttctgcttcccatctccattgcctgacccacatgggttctctctcctgggtatgtggaaaagccagcatctcctgcctatttctgcttcctgcactactctgcttcagggaatgctttgctagtattctccaactccaacaggacactgccttggaatatgtttggcctcctacaatctacagaatactcctcatcggagactgaatagcttggctgtgatctgcacacttactgctaagtttctttgttgtcttatatctagatcatacgatttacagtttccagagtgagacctttccctctaaggaagcctggatttgtcctctggtctcctgcacacttgtatctttgcacatatgtttgcacacacatttgcgtctgtacacatgtacacccacacacaaccataacatgtgtacacacaaatacaagtaaggcttttcctttgtatcacgatgtcagttttcattcagttccatgttctaggcagtctctaccattcgtcccttctcctaaatgagtaaaatgccacacaggaccctaggcaggctgctggactagaagaggtaaccagactaagttggatagctcagcatggctctgatcccaagagctttgctgatggctgtgatgtggcacaggcaaaatgatgtcagagaagattggtatttttactttaatttcctgttcagtaaggattttttcatagagtctagcatgtatcatgtggtgataaatacttatgcttcaattcaaataccctgaatttattccttttgttgaaaggcaacagaagtagtaattaagagcacagacttggagttgaaatcccaactctgccatttcctggtggtgtgaccttggccaactaatttagtctccatccttcaattcccttttctataaaattggactattactaattccattaaattgatatgagagttcaatttgttatccatagcatttagaacattgccaggaacatgtaaacatcatgtaagggttggctattttcagtgtttcatgcagctacataattgtattaatcctcatcctgaggtccaaggtaggatgctggaaataaggaacttcaatgccattttacagatgaggactcagaagttcatggttgtagtggccatgcagagctaggagctgcgtatcggctcacacccccaaagcagaaggagcgttaccaccactttaacaggaactcctgttgtttgcacaagctggagagtcagctaactgttcctgcaaaagctagcctggggacttgcttctctgcttcatccaaggctcacctgtcccctactgtaaggagcagctacagtgccatgaaataatgacttcaagcccacacaggactcaggtggttaatatcagtaaattctacatttttctctcaaattcaactggctctaagccctggtgaaggatgggatgtgtcctctgactggtggacattgatcacatgaaccttttttcagttgtcccctgtaaacgtgtgtgtgtgtgtgtgtgtgtgtgtgtgtgtgtgtgtgtgtgtgtgtgtgcttgtagaagctggggactgatgctgtgtgtcttctttaatctttctccgctgtatttcttgagacatgatctctcactgaccccacagcttaacagtttggctagaccagctaaatagcaaccccacaagatcttccttttctttcagcttccccggtgctaggatcacccgagtcacctctgactctggatatggatgctggagtctgtcctctggtccttgtgcctgtgcagcaagcattctccacctgagccatctccctgcatgccttaaagtcagcaccataaatgatgggaatgacaggtctgaccctgcctgtgctgtttcccagggatgattcccacgacagcttatctcccagctccagctgtgcttggcatcccagctcccacaaactcctctgcctcacaataggacaatgtgcttggcactggagtagaaactcgacctactgtttggttcacctttgctagttccaaccagaaaatattcataaaatgaaagtagattaaactggtttagcctagtcatgtggacagacctgtcaggcagcctggttctggacagtccacttggggacaggtagtcattttgtgtatgtggtggtttccatcaggaccatgtgaagggtgcctcccaggtgtggagaacacatcagctgtgaaatgtgttctcatatcagaagattccacttaaatgggttttaatttgttggcattcaactagaaaggctcaaaagaagcctttaaaagaggcacaggccttagctctccacaaaataaacgaaacgctgagcataatactgatgtttacaaagtatgcattattatgatgagctgatatgttcattattgtcctttgaaacaggcaagcagattttgccagcaaccagatgtgagccattaataaactgaagaatgaactcaatgcaaagcttgcaacctgtctatcatccgagcaacccacatgcctgtgagaagataacccagtacctcactcataacataatcacaccacacacatcctggctgctcaaagtgttccataataaccatttaaattcaggtttgcacattatgtgggctgttctactgacgcagggctaagtgttctaagtcttgtgagatgacccatcttgctaaactctttggttagacttgcccgatgtattattattaagccccatgtattattattaatactatcatctactcactgtgtaagcaccacagagtgactttaagggtgtaattccatgaaatctgcaaacttggagttgaggtctgattctactgcctagcatctataccttgtcaaatgtgtccctttgtcagctgggcacacgatgcagaggaggaagcttcaatttagcttgagacatctccattgtactcagggtgtttcctcacacacagtgatggtcagcaggcaacaccctggaagctggagagacagcttcatcaaaaaggaagaatctgtgactccatagcactggttgctactgagatgggagaaacctgacttagaagaaacgttacattttatgctttaaaaatagatgatcatgataaatatttagtaatctgtaaaatccttatggcaagagttaagctgcttctctttgacttgtcactgccattgactttacttacttactgcttcttccatgcatttttatagatggcattttatatgtaagatgcttgcaggctggagggagccgaactcctgcttggactggaccattctgtttgttccatttttctctctttctgttgtttgacaacctaggaattcttccttgggagacattcccctcattctttacaaaccaccccactgtcctgctagttgctctctctaattttggaaatggagtcatttagtcatttcagtccaggccttgagccctagttccaaattaaaccctaacacagctgccaagggtcatttttctcattagaaaagtggccttcagggagtttccgtttggttcagtgtgacctctaagtcaccagcttgtcctgagaggggtagcagagccagcttctgtctctaggtaggatttggactgtgccttatgcaataagctcaggagattggctcttccaggtgctttccagggctctaaggttctggaggctgcacctagcaccccgggaagtacaattggctgtttaggaaaaaggataagttggtggtcagatgttttggggcttgggaagacagttgtagaactggtgatatttaaagtggatcttaactttagaaacagaatttacagtttacaaaagagatagaaaaatgaatctatccccccctacccaaaacttatcagctatcctttcaatacaatgactgatccaaattctaattccaggacattttaataaaaaaaaaactccacaatttaaaaacaacagtaaatagaaaaggaagaagaggaaggggtgtggtttactgggacaaacagaatccgatgacaaagggagatgtggcttcagttccacattatcatggctttgcctgcctttgtatgcagggtctcaaaacatcagagaaggaaaataatgatggaagcaaatgctttagtgtttaatttttgtatgcctgatctctaaacacattttatacctcttcatggtaaccctgtgtggtaagctctggtgggttcttcattttataaacgagcaactatgttgtagaaagcactgtcagaggttacagacccagagacggaactgagtctgtcttctggcctgttactgtctagaacccaggggcttttcattgctatctctgttatacagcaaaggggcaagaggggataacttgtagagagaggtgtgagagagacttgtcccagtgtcagctcagggaagctttctggtccaagctgtctgtttttaagccaacagcaaaagcataggatcccttacatcctacccctacccatattaaccttctggacaagcctctaggtcccacagatgacatgaaagaaaaaattctaggaacagtgcaccctgtggcctgtgggcacctaggttttggtagggaaattccagccatctggtttctggcaagacttactgaagacaagttagtcaaaatgccagcaaaacagaaacttccttcaaccaccctagaagcagcaaatgccacttttgcttgtaggtggtttcctgtgatgaaagggagactacagtgctttgcactggccaaacaggttcataaattcttacccaaaaatcagccaagtcaccacagtggtggagagtagctgacaagctcatagagcccaccttttgagatttaggcccttgtggagagcacacagcacaggacaaatgctctgtcttgagtcccgggttgtgttggggctttctcgctctctgttcctctgcaggaagccagctgctgtgctgtgaggcggctctggggacatggatatgtctgtgtacatgactctgaagaagaccaggagaagcctgccagcaaccagaggagtggacccagagtctggtgctccaccagtggggctgctgcctattatggcttgggtatacagtgtcccccacagcctcatgtatttgaacatgggcacccacctgatgacatggttttaggaggtaaggtgtcccgcgcgctctgtatttctcgccagcaagaaatcatacacgggacactcggatccttctgcaggaaagctttaatacatcttgtgaggggagagcataagcttaccagagcggagaccctgagctaagaatcccgtcccctaataaaggctggcagccgccgcctgggacgtgttaccctatgattggctgtagctcatccggccatatgacgccacggaataggcagagatcaaggaatggaaaattacccagcgcctgcgcaataatcttgtttacattcggtgcctgccggatgcaggcgccatcttgtaatggagaatgcaggnnnnnnnnnnnnnnnnnnnnnnnnnnnnnnnnnnnnnnnnnnnnnnnnnnnnnnnnnnnnnnnnnnnnnnnnnnnnnnnnnnnnnnnnnnnnnnnnnnnnnnnnnnnnnnnnnnnnnnnnnnnnnnnnnnnnnnnnnnnnnnnnnnnnnnnnnnnnnnnnnnnnnnnnnnnnnnnnnnnnnnnnnnnnnnnnnnnnnnnnnnnnnnnnnnnnnnnnnnnnnnnnnnnnnnnnnnnnnnnnnnnnnnnnnnnnnnnnnnnnnnnnnnnnnnnnnnnnnnnnnnnnnnnnnnnnnnnnnnnnnnnnnnnnnnnnnnnnnnnnnnnnnnnnnnnnnnnnnnnnnnnnnnnnnnnnnnnnnnnnnnnnnnnnnnnnnnnnnnnnnnnnnnnnnnnnnnnnnnnnnnnnnnnnnnnnnnnnnnnnnnnnnnnnnnnnnnnnnnnnnnnnnnnnnnnnnnnnnnnnnnnnnnnnnnnnnnnnnnnnnnnnnnnnnnnnnnnnnnnnnnnnnnnnnnnnnnnnnnnnnnnnnnnnnnnnnnnnnnnnnnnnnnnnnnnnnnnnnnnnnnnnnnnnnnnnnnnnnnnnnnnnnnnnnnnnnnnnnnnnnnnnnnnnnnnnnnnnnnnnnnnnnnnnnnnnnnnnnnnnnnnnnnnnnnnnnnnnnnnnnnnnnnnnnnnnnnnnnnnnnnnnnnnnnnnnnnnnnnnnnnnnnnnnnnnnnnnnnnnnnnnnnnnnnnnnnnnnnnnnnnnnnnnnnnnnnnnnnnnnnnnnnnnnnnnnnnnnnnnnnnnnnnnnnnnnnnnnnnnnnnnnnnnnnnnnnnnnnnnnnnnnnnnnnnnnnnnnnnnnnnnnnnnnnnnnnnnnnnnnnnnnnnnnnnnnnnnnnnnnnnnnnnnnnnnnnnnnnnnnnnnnnnnnnnnnnnnnnnnnnnnnnnnnnnnnnnnnnnnnnnnnnnnnnnnnnnnnnnnnnnnnnnnnnnnnnnnnnnnnnnnnnnnnnnnnnnnnnnnnnnnnnnnnnnnnnnnnnnnnnnnnnnnnnnnnnnnnnnnnnnnnnnnnnnnnnnnnnnnnnnnnnnnnnnnnnnnnnnnnnnnnnnnnnnnnnnnnnnnnnnnnnnnnnnnnnnnnnnnnnnnnnnnnnnnnnnnnnnnnnnnnnnnnnnnnnnnnnnnnnnnnnnnnnnnnnnnnnnnnnnnnnnnnnnnnnnnnnnnnnnnnnnnnnnnnnnnnnnnnnnnnnnnnnnnnnnnnnnnnnnnnnnnnnnnnnnnnnnnnnnnnnnnnnnnnnnnnnnnnnnnnnnnnnnnnnnnnnnnnnnnnnnnnnnnnnnnnnnnnnnnnnnnnnnnnnnnnnnnnnnnnnnnnnnnnnnnnnnnnnnnnnnnnnnnnnnnnnnnnnnnnnnnnnnnnnnnnnnnnnnnnnnnnnnnnnnnnnnnnnnnnnnnnnnnnnnnnnnnnnnnnnnnnnnnnnnnnnnnnnnnnnnnnnnnnnnnnnnnnnnnnnnnnnnnnnnnnnnnnnnnnnnnnnnnnnnnnnnnnnnnnnnnnnnnnnnnnnnnnnnnnnnnnnnnnnnnnnnnnnnnnnnnnnnnnnnnnnnnnnnnnnnnnnnnnnnnnnnnnnnnnnnnnnnnnnnnnnnnnnnnnnnnnnnnnnnnnnnnnnnnnnnnnnnnnnnnnnnnnnnnnnnnnnnnnnnnnnnnnnnnnnnnnnnnnnnnnnnnnnnnnnnnnnnnnnnnnnnnnnnnnnnnnnnnnnnnnnnnnnnnnnnnnnnnnnnnnnnnnnnnnnnnnnnnnnnnnnnnnnnnnnnnnnnnnnnnnnnnnnnnnnnnnnnnnnnnnnnnnnnnnnnnnnnnnnnnnnnnnnnnnnnnnnnnnnnnnnnnnnnnnnnnnnnnnnnnnnnnnnnnnnnnnnnnnnnnnnnnnnnnnnnnnnnnnnnnnnnnnnnnnnnnnnnnnnnnnnnnnnnnnnnnnnnnnnnnnnnnnnnnnnnnnnnnnnnnnnnnnnnnnnnnnnnnnnnnnnnnnnnnnnnnnnnnnnnnnnnnnnnnnnnnnnnnnnnnnnnnnnnnnnnnnnnnnnnnnnnnnnnnnnnnnnnnnnnnnnnnnnnnnnnnnnnnnnnnnnnnnnnnnnnnnnnnnnnnnnnnnnnnnnnnnnnnnnnnnnnnnnnnnnnnnnnnnnnnnnnnnnnnnnnnnnnnnnnnnnnnnnnnnnnnnnnnnnnnnnnnnnnnnnnnnnnnnnnnnnnnnnnnnnnnnnnnnnnnnnnnnnnnnnnnnnnnnnnnnnnnnnnnnnnnnnnnnnnnnnnnnnnnnnnnnnnnnnnnnnnnnntccggccctatgacgccacggaataggcagagatcaaggaatggaaaattacccagcgcctgcgcaataatcttgtttacattcggtgcctgccggatgcaggcgccatcttgtaatggagaatgcagggacggctccctacagtaaggtctagctgaagaatttgggacaagagggacaaatctgaagacatagacaagccccatttctggtcttctctgcctcatgtttgccaaaatgtgaagaggtaaagagtcccaacagtatgttcccactgccatgcagctatctgcctgccaccctgatggactgtatctcttcaaactgtaattcaaaataaatatcccccactttaagttccttgttgggtagctgacctagcaacaagcaaagtaaaaattaaccaaagcacagataacatgtctcaccaaagccccatgacaggcagcctttgagccagaggcacccagctaagccacagctgaatatccactccacaaagtgtgtattgcttgacagatattgttcagtggaaaaatttttattcagtggataagtaatataatactaaagtgggaagaaatatctggtaagaatagagacagatagcacactgagtttaacattcagcaaaactttccctgtcaacttctaagaatcccccatactaggttgtgtaccactggctacatcacaagacttatccgattcttgtctatgaccaggctttgtactacctgagttctagagtaaaaaatgctcacatattctgtccctttgtatgcaagaactgagactcaatggaagcaaattctccaagaccactgctagtcagtggcagtccgctcctagctgtcaactactagtagtaactactgaaaacataccagttttttgaccgaggctatgcaacccttcccaaggctccatgttccctctagaggtgctgtgaatatgcatctatatttaaaaatcaaatataaatctggagcctggggtttgttcctactacccctcttttctccacaaacccatctctaactgaccaccaaagcctactgacactactttattttttatttttttgtgaccagttttcttcgctccatttttatttaaattagaaacaagattatttttcatgtcaatcccagttacctctgctcccccctcccctgccccacaactaacaccctgcctatcccataccctttctgaccctcagggaaggtgatgccttccatagggggtcttcagagtttgtcatatcctgtgggatagggcctaggcccacccctgtgtatctaggttcagggagtatctctctctgtgaaatgggctcccaaagtccattcctatgctagggataagtactgatctgctacaaaaggccccatagatttccaaagtctcctcactgacacccacgttcatggggtctggatcagttcccagtgatcagtctgggaaccaagagctccccttgttcagtgggtttcaccaacctggtctggacccctttgctcatcactcctccttctctgcaactggattcaagttcagttcagctgacactactttaaaaacatccacttctctccagctccatcgtctgctgattagaacaaccgaaagaggttaagctaggctttgggagcaatctcatccctagatttcagtgtcttgacataaagaaagcttttttctcacttatatcacaagtaaggcatgccttcttcttctttgaacttttctgtctggtcctcaggcttactgagcaagcaaggggatggcagaggccactcatctctaactgaagtgatgtccatcagctccacttgtacgccattggctgtaactagctgcataaagcaaatcaactacaggttatactgggcatgtcagtttctcgacagctgtaacaaaatacttgacagacacaactgaaaggaggaagcagttactttggttcatggctcgtgtgagaagttacttatctcagagtggggacaaagcagaggaatcaggaaaggggtctgaagacaggtgtaacattcattcaaaagtattccccaggcgcctaccccaccccacacaccagatcccacctctgaaactttccatcaccttctcaaatgtggccaccagctgggaccaagccttaaacacatgatgttcccaaggacattccacattcaaactgcaacactggaagacaaagagggcaatcggagtaccgagcaccctagcccgtcccccacaacggaactaacacagtaacctttctcagattctttgatgacatccacccaccacttacctcttctctccagaaatgtctttgctgaggatctgaagggtctctttaggatgtattcttaggatgcccacttggcctgaccctgtgtagctctggactggtctggcctcatcttcctttctcataacccactgctttcttcagcatagccacccaagtcttcccgttcctctggctcctttcctccttttacagaccactcaacaaaggcaggtctctctcacctcaaagtctgaaaaaggtcatacattaatctctgaattttgagtaatctaatcttagattattactggttcagcaaactagtggtgtgacagataggaacaaaacaaagtagaagaggatggatgttgtagcctgtggcctatctcgcttctcagaggaggtgtggaagttatatcctctgtgttgctactcctggaggaagatggcttcagtacacggtttgtttctgtgctgccaagtttcctcatgagctttgcatatcttcttgtttctttccagaatattcatcactctaccacacaccttatttcttggttctctgtgacagtcctggtatcccttcccttcctaacactgtcagacttgccattttatagttgtctgtgaaattttacccttgcccatcattttcactaaattgtaaatactggagaggtttgctcatagcagatgagcttcccaaatgtggcagatctcagcaagaaaatggagacaccagaagggagcagtgttcccctttccccttttgtttttccttctttgagttcataacacataaaaatgatgttcttaaaattaaaatccccgctctctcttctccagccgagcaagatgcccaagggaaaaaaggccaaggggaaggcccccgccgtcatgaagaaacaggaggccaagaaggtggtgaaccctttgtttgagaaaaggcctaagaacttcggcattgggcaggacatccagcccaaacatacttcgtcaaatggtcccgatacattcggctgcagcggcaaagggccatcctctataagcggcttaaagttcctcctgccattaaccagttcacccaggccctggaccggcaaactgctacccagctgctcaagcttgcccacaagtacaggccagagacaaagcagaagaagcaaaggctgttgtcccatgctgagaagaaggctgctgccaaaggggatgtcccaactaagaggccacctgttcttcgagcaggagtcaatacagtcaccacttggtggagaacaagaaagctcagctggtggtaatcacccacaatgtagaccccattgagctggtggtcttcctgcctgccctttgtcggaagatcggggtcccctactgcatcatcaagggaaaagccaggctgggacgactggtccacaggaaaacatgtaccaccgttgccttcacacaggttaactaagaagacaagggtgctctggctaagctggtggaagctattaggaccaattacaatgacagatatgatgagatccgctgccacttgggaggcaatgtcctgggtcctaaatctgtggctcgaattgtcaagctggaaacggcaaaggccaaagaactcgctactaaactggttaaatgtacactcactgctaagttttctgtacataaatacaaacttatcttccaaaaaaaattaaaatcccatctctcctttgctgttagaatcccatcacccaggagacagcaaatgtccatgtcctgtttgctctgtggatggtgaacttgatggtcatcccatagaagtaacttgcatcaggcagtcccatatccacttctcaaactggggtgcacacacagcttatgcacaagaaatacccacatgctaactgttcctcatgctagctctcatctccagtcccactctggtaccccacttccctctgtcaagaattcacttgcccctcctctctgactcatctattaagatttacctcatttcctaacctcttgagaaagccttctcaatctgcaaagccagggaagccaggtgtttccttgggccttcccaagctctcatcatctgtagacaacttttcatcactgtattctcacatggaatctttttaaagatttatttctttaaagggagggagaaaagagagagagagagagagagagagagagagagagagagagagagagagagatgcaaacatgtgtgaagctgtctctcagaggtcataaactgacattggattctctggagatgtagttacaaagggttatgagccactggtgggaattgaactctgatccttggagctatctctcaaactccaacatggaattataagtgcctgcatgtggtgctgtcagcttccatgccaacatacacagtcatatccttgtatcactcttctctatgtacacacacaaaaacacaaataaataaatatttttgaaatttttattcaacaaatgaaattctgtaaaccatacccttcctttattaatgcaaattacctgaagtttccacttggatttctgctccacaaggtactagactcacccccaccgagtaatagtacaatccagagaaggctgatgttcacagtgtcccatttccataagtgagagttttataaacagtcaaagaagctatcaaatggctaagactgtaaatcaatcaggcctccctctgccttctcctcctacagatcctgtttgttttcatcctgaatctcctcttcttcctcctctcttctgtctctcctttctctttcaaatcctcttccatctcttcctcctcttgcttctcttcctctcactccctcatctccccaatgaaacccctaagctctagtcttcattctcatctctcccttccctgctctctgtatctcaccttctccccctacctggaactttcctgagattcatctgcaatggatgtagtgacctaagggtaaaattttatgtgacttacactaattatgactcagatgctgcccttcttagcagacttgctgcagtacgtttctggagggaattattttaaaatttgttatgttctaaggtgagacaggtaacacaacaataacaatttctttcggcaacataaaatagtctccttgcaaaaatggagggcatttccattaagaagacctaggttttgatctagatactgatttgccctgacattgtcacttctacatctactcgtatggccagtctgtattccagcccttttcattcaagtgtaattatttgagtctgcaaattgaacaacagtgtcagctccacagggcagtgggggatctagggaagctatgggtgagggtttctccaagttatgtccttatataagaagtgtgtgtgtgtgtgtgtgtgtgtgtgtgtgtgtgtgtgtg

SEQ ID NO: 7 - DNA, 276587 bp, synthetic construct
  source 1..276587: mol_type = other DNA; note = XP_003512331.2 Contig Sequence
  misc_difference 1..276587: note = N can be a,g,c,t
cctttctccacatcctctccagcataaactgtcattgatgtttttgattctagccaatctgacaggagcgagatggtatcttagagttgtttttatttgcatttccctgatggctaaggatgttgagtaatttcttaagcatctttcagccactttagattcctctattgagaattgtctatttagttctgtaccccactttttaaatatttatttatttatcatgtatacagcatttgcttgcatatatctctgcaggccagaggagggcaccagatctcattattgatggttgtgagccaccatgtggatgctggaaattgaactcaggacctctggaagagtagccagtgctcttaagctgagttgtctctccagtccgtgtcactgcttttttaaatcacctgtttacttgcctgtaattagaggggaccatatcttcttaaacactgggaagccacagtgtgcagggtcaaagacatttgcagagtggtgatgttttaatattctgtgtcctttgccttagagaagcttctcagtgtcaggaggtcccatctattaattgtcaatatcagtgtctgttactgctgttatgttcaggaagtagtctcctgtgtcaattagttcaagactacttcccactttttcgtctaagaggttcagtgtggctggatttatgttgaggtctttgatctgtttggagttaagttttgtgcatggcgatagacatggatctatctgcagtcttctgtatgtcagcatccagttatgccagcaccagttgttgaagatggtttctttttttcattgtataattttagcttcattgtctatgcctctaaaccgaagaatagataaaggaaatgtggtacatttacacaatagagtactactcggcagtaaaaaacaatggaatcttgaaattcacagtcaaaaggatggaactagaggaaaccatcctgagtgtggtaacctagacacggaaagataaacattgtatgtactcactcataattgggtattagacatagagtaaaggattaccagcctacaatccacaaccccagaaaagctaggaaacaaggaggaccctaagagagacatacatggacccctcagagaaggggaaagggaaaagatctgagtaaattgggagcatgggggagggggaaggaagtaacagatggagtatgggagaaggggagggagaggagaacttgagcaatcaggaaggttgagtggggggggcagagaaggagagcaaggaaagagataccttaatagagggagccattataggcttaactagaaatcccaactaagaatctaagcaatagtggagaggctaccgtaaatgcctttcccctataatgagattgatgactgccttaaatgccatcctagagccttcctccagtagttgatggaagaagatgcagacacccacagttaaacactgagccaaactcctggaaaccaattgtagaaaaggaggagtgatgagcaaaggggtcaagaccaggctggtgaaacctacagaaacacctgacctgaacaaggaggagctcatggaccccagtctgacagctgggaaaacagcataggatcgaacaagggtctctgaatgtgggtgtcagttaggaggcctgggcagtctatggggcctcnnnnnnnnnnnnnnnnnnnnnnnnnnnnnnnnnnnnnnnnnnnnnnnnnntccctatggagggatactctctcatcctcactacacggaggagggactaggtcctgccccaaatgatgtgtcagactttgattccccatgggaggcctcactctctatgaggagtggatggggcatggtatgggggagtgggaggtgaaaataggaggacactagggagagggaactgggatttgtatgcaaaataagattgttttaatttaaataaaaattaatttaaaaaagaacccagcttacaaaacaaagactcagaagtcaaaaagagctaagcatgtatttctgtgacagagcttttacctcctacatgttaggccctagatttcatccccaattctttatatttttagtaggaataaaatatatatatatatatannnnnnnnnnnnnnnnnnnnnnnnnaacaagctcatggaaaatattaagtgagagcctatattaaccatcgtcattaggccagctgctgaaatccatatgatctcattgatctactcacaggcagaattaaccagtggttctcctctaagccattatttcatgagatgtgactcaagattcagaccactttgtggctcagctacctagaaccaagggctatcctgaggctagggaagaaaaagcattgggtgctctgcactgtgttaggcaaccaccaataacttctagaaaattccttcaagtgaagtaaaataaaaatggtgatacctggagagatggctcatcagtcaagagcatatactgctcttccagaggattccaatttactttccagtacccacatcaaatagttcaccacttcctgttaactccagtaccaggaaatctgataccctcttctggcctcttacaagcacatgttcacatgcagagccacagaaacacaaaaacagacacataataaattcaataataatttattatttacgaaaacacataattaaaaataaaataagtcttttaaaacttttttaattaaaaaatggtgaaagggccgggcgttggtggcacacacctttaatcccagcactcaggagacagaggcaggtggatctctgtgagttcaagaccagcctggtctacaagagcgagtgccaggataggctccaaaagccacagagaaaccctgtcttgaaaaaccaaaacaatggtgaaagagagctgagtataatctcagcatctgaaaagtggagggaagagaatcaggaattcaaggttagcgtcagctacaaagttatttttaagccagcccaaactccatgaacctttgcctcaaaaaaccaccaaaaagaccaaaacagaacctaatagtatgctgtacatatgtaatcccagcactgtggaagcacagggattgagagtttgagcctaacttgggatacattgtgagatatgtctcataaataaataaataaataaataaataaaccaaagctaaaattgtgaaaagtagagtcaaatctcagaaaatgatagaagaaaatgtagtggcttttgcttccaatcctgaaaacctgagtttgatactctggattcatatggtgaaaggagagaaacaattctacgtgcacactgtggcacacatgtccacactcatataaaaaataaatgttaaaaagtaaaaacagccaagtgttggtggcacatgcctttaatcccagcactcgggaggcagacgcaagaggatctctgtgagttcaaagtcagcctagtctccagagtgagttccaggatagcctccaaagctacagagaaaacctgtcttgaaaaaccaaacaataaaaaagtaaaaacaatgtagaataatgtcacaatgtgtgggtagcactatgataagatatacaactcagaaatcacacagcaatgattcagcaaatgtttgtataagactgtataacttctcaggagccaaaaatagcagtttcatctagagagactgaacaagggaagatactagcaatgttacacaccagaatgaatagccatagtttacatcgaacttcctcagggtgcaacaggtcccagatccagaagcccaaatagtcggataaatttaggaggaggtcatattcactgtggacaagaggaacgcaaaaccaaacaaactacagtaataccttacattctccaaaacagcaaaactggaaaactgggcaacatcaagagaaattctcccatgttgctggggcagcaatgactgtcatgcagtttgtggcaggccaagacccgaagcactaagagtgtataacacggagtagaaataatgaaatgtgccaggtccatgttactaacaactatgcagcaacagaaaactcgagtaattatgcattatggccagcagaaagaactcagaatccctgttggggatagagaaaaaccatgcacatatggaagaaaaaaatcaatctccaaattctaaaaagaatacacatacctaaggacagagggaaatcagcacagaacctttggaaagaagggcagttggagcaggaaggcaggaagaaggcaaatacataaagttattctccaatcctccatgttagtgaggctgcaggtaaatgtggtgcaatttggagtgggatggtgtcaaacaggggttttctccaagaggtaattctataatgtataaaatttcaaatgtagtttttttgttttatttgtctatttttatttgtttttgttttgagacacagtgtcactatgtagctgtggctagtctggaactcactatgtgaccaaactattctggaaaccacacacatctgcttgtcattgcctcatcatgagtgctgggattaaaggcatgtgttaccacacatgactggattttttttttcatttttgaggctgttttgttttacatttatttttctggatgggggtggctagagagatagcccagtgattaagagcatgtactgctctttcaggcaagcaaggtttagatcccatcacttgcatgacagttcacaagcaattgtaactccagttccaaaggacccaacacactattctggccttcttgagcacatacaaacatgcaagttgtatattacataaaaattaaataagtctaaatttttattgttattttatgtgtatgagtgtttggctgcatatatgtaattacactaccatgtggacgcctggagaccaaaagagggtgtccatgtaagcccttcaaagaatgaatggctagactctgcccccatacttctctaacaaccttaacggctggtcctggcccttcaagccacccggccctgcactacagaaaaaaagcccaacatcaggcatcaaaatccctccagtcccaggccaccctagaaaactctacccacccaccaaaataccccataaaagccagttctttgctgcttctcccctgagcagaggaagctaccctcccttctgtgtctttcccaataaatctcttgtgcagtgtgactttgttgtattccttggttcccatctaccagtccacctttcccttcagaactgtaacacctaacagtccagttccctggaaactcaagttacagtagttatgagctgctatgtggatgctggcatccaaactctggtaccctgaaagatcagtatatgctgttaaccactaagacatcactccagcccctattatttgtttttgagataggatctcaatatgtatccaaggctggacttgaactcctgatcttccaactttacattctgagggttaagattacacacatgcaacactacacccattttaaatgttcatgtttcccctgttaattctgcttagagctaattatcctagagagatagatacaccttcaaggctgttagttgcaataataaataatagctttctcttttcctctttttaaataaaaacataacagtcactgctcaaacaaactgtggttcacccaaatgtcaagtattgtgtacagcagtgaaagggagaattattggcaaaagcaacaactcctgaaatggtctcctgaaagcatcaggctaaataaaaaaaaaagactactgttgaaggttgcaggctatgtgggtactctgatggcaacaatcttccagtgactaaattcaagacccttaacaggaaacagcttacacactaggtcccatgaatttccaggaagaatagagtttataaaaagtcaacagaagaaacccttgtgctaaggaggcctgtgtaccgactggggtagtaaagagaacccatgtggtaagcccaacacaagcactttagacacttagtaggtattttttcttcttttggttttcagaggcagggtttcctggaactcactctgtagccctggctgtcctccaactcacaaatgcccccccagcctctgcctcccaagtgctgggactgaaggtatgggacatcacccacccaccgactagagtgttttcaaaaggcttgttttttgaattgctagggatggaacccaggtattgttaatactaggaagtgctctaatactgactacatccccagcccttcttaagagagtctgaagctgcactaaggtcacccaagaagcccaaagccgagccaattcgaggagccacgggtctcttgaatgtctctaggcagtttccagttaatctgtggtttatacatgcaatcacagctacatgagtagctgaggcatgaagaacgcaagtttgggacctgcctgaaacaaagtacgcgttcaaaatgagtcatgggcaggaccatgtccaaaaacagggtggtgggggggtgggatttgggaggttttgttggttttagcaagagatataaacagcaagcatctcaggtgcaatctccagaactaaacaaagaggaatgggaaatacactgaagccacatctgactgctcgtacctcaaaccctcaaagaaaatattcgtgattcgttgataaccacggaacacacaaccatccgtcacaagggggtggatttcctcggtggtcgtgatttctcattagtggagttagtcagcctccgacaaaggaaaagaacttccgataaagagcacagccattgaggtaaaggcggggtgggatcagagtatcttttggcaatgccttctgataaaacttgggcttatccattttgggggcgttagttccttccccagcgaaaaggacaagtacggaggggtcaggcggtggtggcacacgcctttaatcccagcactcaggaagcaggggcagtcagatctctgtgagtgcgagaccagcctggtctacaagagctagttccaggacagcctccagagccacagagaaaccctgtgtcgaaccaccccactcacccaaaaaaagtaccgaggggaaacctctgtggagggccaaggcgcagacaaccttgtggattgtggatcttctcattctctttcccctgagatgcaggcctcgaaggtcacagaatcatgcttgccaggaagtttggccaagtacccaatctgggtaaccatggaattacatcacaatgcctctggccatgacccagaactggtcccacaaccctcttgcaccaccaccacccatgaatctcatattcactggactcctctccttcccactgtgccctgttctccgagtgtccctgagcttgagcgggagaactaaccaacacgaaccactctccaagaagtaggcagagttggctggccaccatgtcacaacactggaggctattgtcagaggtgttatcacattcttgggtgggggggtactgaggtaacaaagacatgtcacatgaaaagtgtagctcaccagaaggggaatcttgttctgttgctagatcacttgtatcttggcctcattcagctggggtttttcagtccctggctctagtgtttcttggggtacacaagggaagtcctgtagagaaagcttgtgactttctacagggtctcatacaccagggtctccagaagctgatcccagtatgtccctgcccacaagtaggaccctagggtcttttggagacagtgtggccactcttggcacctacaagcagagcctctccagctgtctcaaatcaagggctctgctttggctacagatcaagttctacttgcacttaatttggcctgggactgcctgttgtgggctagtgttctgccccttgggcccctctcactgactgtggcagcctgatctcggagtcctctctggtatgggtgttgcagagaaaggacacacactggccctctgttgggcgatgaggagagggacacggagggcactgtcatacactgccctgtctctggtagtccttggcaggtaccatgactcaaactggtgccctctgtnnnnnnnnnnnnnnnnnnnnnnnnnnnnnnnnnnnnnnnnnnnnnnnnnnnnnnnnnnnnnnnnnnnnnnnnnnnnnnnnnnnnnnnnnnnnnnnnnnnnnnnnnnnnnnnnnnnnnnnnnnnnnnnnnnnnnnnnnnnnnnnnnnnnnnnnnnnnnnnnnnnnnnnnnnnnnnnnnnnnnnnnnnnnnnnnnnnnnnnnnnnnnnnnnnnnnnnnnnnnnnnnnnnnnnnnnnnnnnnnnnnnnnnnnnnnnnnnnnnnnnnnnnnnnnnnnnnnnnnnnnnnnnnnnnnnnnnnnnnnnnnnnnnnnnnnnnnnnnnnnnnnnnnnnnnnnnnnnnnnnnnnnnnnnnnnnnnnnnnnnnnnnnnnnnnnnnnnnnnnnnnnnnnnnnnnnnnnnnnnnnnnnnnnnnnnnnnnnnnnnnnnnnnnnnnnnnnnnnnnnnnnnnnnnnnnnnnnnnnnnnnnnnnnnnnnnnnnnnnnnnnnnnnnnnnnnnnnnnnnnnnnnnnnnnnnnnnnnnnnnnnnnnnnnnnnnnnnnnnnnnnnnnnnnnnnnnnnnnnnnnnnnnnnnnnnnnnnnnnnnnnnnnnnnnnnnnnnnnnnnnnnnnnnnnnnnnnnnnnnnnnnnnnnnnnnnnnnnnnnnnnnnnnnnnnnnnnnnnnnnnnnnnnnnnnnnnnnnnnnnnnnnnnnnnnnnnnnnnnnnnnnnnnnnnnnnnnnnnnnnnnnnnnnnnnnnnnnnnnnnnnnnnnnnnnnnnnnnnnnnnnnnnnnnnnnnnnnnnnnnnnnnnnnnnnnnnnnnnnnnnnnnnnnnnnnnnnnnnnnnnnnnnnnnnnnnnnnnnnnnnnnnnnnnnnnnnnnnnnnnnnnnnnnnnnnnnnnnnnnnnnnnnnnnnnnnnnnnnnnnnnnnnnnnnnnnnnnnnnnnnnnnnnnnnnnnnnnnnnnnnnnnnnnnnnnnnnnnnnnnnnnnnnnnnnnnnnnnnnnnnnnnnnnnnnnnnnnnnnnnnnnnnnnnntatagttaattcttttttaaaagattttatttattatgtatacaacattctgcctctacatatgcctgcacgccagaagagggcaccagatctcattccggatggttgtgagccatcttgtggttgctgggaattgaactcaggacctctggaagagcagccagtgctcttaacctctgagccatctcttcagcccatagttaattctttttaaaaggatcaattaaggatggcaggcatacttttgcaggtgtcatatgcccctctgttagtgctgtaccttcttggacttgcctttgatactttcccccctctccaggtggctgggaggcagaggcaggcagatggatctctgtgagttcatgaccagcctggtctacagagcgagttccaggaaaccctgtctcgaaggcaaaaagaaaaagaaaaccccctgtccaggtgggcagcttcttgaggttcccagagtgttgggccctactctctatcctggcttttcaacaataataccaatggaccaagggaaggactttatctagttgtatctgcctgtctcttgggcaatgtcttctgggcctgggcagcctcagatgcacaaaagtgaggatcccagatatacctgtttctacctacttctagtgtagaagtggagtacagaaccttccagagtcatggaactgtcttagctcagcagtttagtcctttatcccctgtatgtttcttattgaataactagcttttggccaagtgctctgaagtcctgccttatgggttgccagcagaggtcatgccaatgagttgagtgctaggagctgaaagaggatataacctgcagtgtaggtcttgtcccagataacctgacttcttggcccttgactacagatgagtgaagtgatgacagtgggcttgagagccttgcatagggctaggtccgtttcaaggagatatcccagccatctgtaggtttcactgggagctagaatgttgtttaattttagctctaggggacacagggaaccatcctcatacaaaggatgcagaaaggggttactgagaccaagagatttccccattgcatttgtagcaaggaggctctatattacaagtcgcatttgaggatagaagagaggaccatcaagaatacttaggaatggctgggcattggtagcgcacgcctttaatcccagcactcaggaggcagaggcaggccgatctctgtgaggtagaggccagcctggtctccagagcaagtgccaggataggctccaaagctacacagagaaaccctgtctcaaacaaaaaacaaaaaccaaccaaaaaagaatacttaggaccagagcactatgcttccttccgtaggaatgggtatccctccttcattgatgaagaagtatatacactctgttgtaagagggagaatctttgtaatggtgccttattttgtgcgtttgagaccagcctagtctacataatgagttccaagccagccaaggttacatagtgagaccctgtctccaaaatatcaaaataagccaagcagtggtagggcacacctttaattctagcactcaggaggcagaagcagaggcagatggatctctgagttggaggccagcctggtttccagagtgagttcaggacagccaaagcacctcaaacccacctcaaaagccaaacactaagagctggtattattatgttcatggtatctaagagacggctaggccttgatgctatttctaagacagtttacctgatcatcactgctagcgatcaccaactagctagcaattaatcttaatgccccacattttgcctacttgatcctatgccattctaggtacatcatatacccatctctgtgaaacaaagagcaaatacagactgtgctacctggagatcccacagcctatacctatgccttgttggtacccttgccagtttggacttcatcactctttccatgaaagatacagacactcacaggacaatggaagcaaaattttattcctcttgtctgggaaagagaactagcaagtggttgtacatagaactcccaccctcccagaaccaaaggagtcaggcgctgccaccaaatggctccctttacccaagtgaaagcccagagaggcaggtgagcacagcgcagggcaggggagactgcagtgacagagtggccagagtgatctaagggagggcccagggctcaggaaaggaaaatggacttcttgggggtgggacaggtgtgaggttgctctttgctatgggagattctggctggcatagttgtcaggctcagggcaccataatgcggtatgggctgcctgggatatgctcatcaccccacttgaccaccagtgtgtactcccctttgtccttgagcaggtaggagacactgtagagacggctgcccatgtgtttcaccaggatctcttcacagggtgtccttgggccatgcacccccaccagcagcatgttgttacctgaggtaggaataggcctcagtgactagccttaaccccttccttcagctgtaattgctctgagcccttcttcctattctacatcctgttccttgcctgtttagaacaataccccttcccaacaagcttctcataccccacctaggccaccagaagacaaatcccaggtcttccaggacattttcttcacagacacagacagacagacagacagacagacagacagacagacagaacacacccacacacacacacacacacacacacacacacacacacacacacacgtacgtcttttagacagggtttcactgtgccttgactgtcttggaactagctctgtagaccaggcttgccttgaactcagagatctgcctcccatgtgttgggattaaaggggtgtgccaccaccaactggcaatgcattttacatgcattggtgttttgcctacatgtatgtctgtgtgagggtgttggattccctgaaactggagttatagatagttgtgaactgccatatagatgggtgcttggacttgaacctgagtcttcaaaaaagaaaggaagaaaggaagaaagaaaggaaggaaggaaggaaggaaagaaggaaagaaggaaagaaagaaagaaagaaagaaagaaagaaagaaagaaagaaagaaagaaagaaagaaagactgattatataaactgggcagtggtggcacatgcctttagtcccagcactcaggaggcagaggaggcaggtggatctctgagtttgagaccagcctggtctacagagtgagtgccatataggctccaccctgtctcaaaaaaaaaaacaaaataacaaaaaaaaacccacaaaacccaggtcctctggaagagcaaccagtactcttaaccactaagctacttctccaggaagcccaaatataaagtagcccccaaagcaacaatcatacccctaagttcctgtactttccacatgttgactgtcttgtgatttctgactttgtacttccagagctagaaacagggatacttacctgctttgctgcagtctactgtgaagctgctcttctggcctacataggccttgctcagccccaggcctttggctactaccttgctgacatcagtgggacttgggcctgaggttgcaagctggggaacagtggcagggtttgtcagggagtccacaaatacagatgttgtctcatgaagactgtggttactaacaagacggggacctgcaggacagaataggtgaaactgagaagtagctagagaatatcaaggcattgaatgggcaccaacagcttagcctggggctcacctgtgaccttggctttgaaggggcttcccccaatgtgatagggcccaccatacttgatggagatgaggtagcttccgggtgccataggggtataggtgacacggtagccctcagggcactcctggcaatccatcttcaccttggaggggccatcaatggtaacggaaagggcaccagctcctgcattgcttgtgttgacgataaactcagctgggctccctgggagcatggaaggtcaggcagagtgtatgtcactggctctcctgtcttcagccacccagcacagccttgatacttccacatgcttcctgttgctaagagcttggatgcagggccctaacaactgcatccacactcagaaatatacccatgaacctacctgtgacaccaccttccaggcctgctccataggcggacaccaagcctgggtcccctccatgcccataatacccaactcggatcttgaagggacttccagggatatgagtaccattgaacttaacatcaatcaagtagatgccattctctcgtgggatgaaacgcacagcatacttatctgagatgcagaaggacatgtcatgggcctagggtacttttcagtatttaacaagcaaatggtatctaaaaggaatagccttagtactaaccatccctttcatttttcttgccaccagcaggaactcaactgctccatggagacccctctgcttccagaactgtactgggtacccaccccaacaacacatacatcctgaggactaagattatagatacctaagaagtctactgttgagtcctttggactgacaagcaaaatgcccacattgttgcctccttagaccatgtactgttaataccatgctagcaacagattagcagcaggtttagcaaggaatttgcttcaggtcatggacctgtggggagggggaaaactagtatgcttcaatagaactgctattcctctagccacagggatagactgtctctgtctctgtgtcatgtatggcacttctaaggctttcttcctagtggccatgctggaaagccattatcttcatgggtgttttatcaatctggaaagctgaggagcccaattttgattgcttacagaatcattattttccatgtgtacactcaagcctggttttagtccaatagggcagatggctggatggctagacagggatagagcctcaccttggtcaatctctgtgacatagcactcctccagagctcctgaggggctgtgcaccttggcatcaattgcccccttggctccattcagactgactgcaaaagaggctggctggttgacctttaaccctgactcctagaagcacagcagatgtggttagacaggatggctagagccagggaaaatggaagagtaggagacccacagggtaacttacccatctggtatccaacatggtttaaagagggagagccattgatctgtgagggcagcaagccacagacacacccccaacctcctatcccctaaatgtgtagtcaacaattacacacccaggcagcagaaagggaaggtggccccaccctataggtagcactcagctctagcaggctgtccctctttaaaccttagccctggtgctcaatgggcacaggcttctgttcaaagcctttagacctgagacacgagaaaaacgccacacggtgggcagggcagctcctgccaaccccaagcgtgggctgtacccggccagagcagaaacctagcacccagagttgtttctgggtgggccactcagctcagagctgaggcctgtttgccatggtgactctggtctggccgggcccaggagccccaggtgggcagtttctctcagtgcctcacctgaagactagaaacagtaaggcggcgggcgtcaccagacggagaagccacaggcaccacgaaagggctatcaggtatgtgctcctcgttgaacttgactgagacctcatagtcacctggacaggaagaaaacataggctgtattagagatgtcacatatctccaagagctagcctaggaaaggcctattgccttccacagccagcttgggtgtccctggaacctcaagatcaagaataagagccaagtggagactatgtaacacctggggtcaaaacacccacactccccctgccccagccaattctgtttccagtacctggctcctgaactacgtaggccacaccacaggagccatccttacggtcctcaaaagatatctcagccttgctggggccctcaacagcaatggccaggcctccagcaccagcttccctggtccaaatgctgaactccgctgtgggaaagcagtgtgtgctcatggagcagagaactggttccccacccccagacaactccaaacaaagccaagatcaacataactgctagctacctcctctaaacacccatctaggcctacccaggatagcaagaattagacaagcacacctacctggcactccagcttcagccctctctaggccagggcctccagcacgaaccttatgggcacccccttccccaagaggccccacagtgaactggaatgggctcccaggcacatgttggcccttgtacttgacgctgactgtatgcattcccatctcagcaggcacaaatcggatacagtaagtatggttctctccttctacgatctctgcctcgtgggtcttgcctgatgggctggtcacctgggctgtcatatcttggatactaatttctacaagtagaagatagcttgctgagcaaagccctgtctctacttgtgcttagggttaccctaggaacccttctggtcttttccctaccaggaatcttcaggctgaggtcacaatgactgccaacattggccactgaaggggcacgtcgcctgcgtgtgatactttctttcacccggccctcacccatcaccttcacagagaagggactgcctgtaggaaaaaaaggaaagtccataccctgcacaggttacaggtggacactgaagtgtgtccaggaaggctgccaaatcacaggggtgtggctgccatactcaccaggcacatgctggtcagcaaacttaatgtttatgatgtagtttccaggctctgtgggacagtaagtgaccctgcatgtaccatcctccaggtcctctgtgttgatgtctaccttgctaggaccctcaatggacagactgagcccaccataacctgggggatagatagcagctataagccagaatgccaagtgaagctatattgccccagctggcaggccaccactgcctacctgcatctctggtgtcaataataaactctgcaggttcaaaggtatgaccttcacgaagaccttgtccagagaccctcacacgactggcatcaccaatctctgactggctgatcactactgggatgggactgcttgctacatgctggccattcttcttcacatgtaccagatgttcccctgtctccttgggcacgaaggaaatccctgggcacagggtagagccatcaacagtgtgtgtgtgaacccatagcctccctccttcccccaccccaaaggcaatgatggctttaacttactatgtagccaatgactgattcccctgatttctcctgcctccaccttcccacacctggctctccctccttcccagaaatgcttgccaacttttaacctcttacccacgtggccattgcgcaaccgcttcagcaaacagggctcctcccggcctgagggtggcaccacagtggctgtgagttgactaaggtctgtttctgagatattgatgggaatatcagcagcagaacccacctttaggtgggacatacgcatggaatcgtcacctggtaagagtgtaagccattagtcactatggatccagccacaaaagactgtgcccaccctgccatctgttcttgtcattattcctgatgctccccacctgtgactcttgcagtgaaggggctgcctgggatgtgctggtcattgtacttgaccaggatgctatagtcaccaggcaacacaggcagataagaaacactgcatgttccatcttggttgtcagtgcagctgatttctgctttagatggaccctcgatggccaaagacaagcctcctgaaaagcatcacaggtaagagtgggtgggaactgtgcccagggaagcattgctgggccttggtggatgagttgacttgatggctcagcagagtcaggaagacgaggtaaagaactccattcaggatcatctcccataccagccctcagccaagggaggacaacttgggctagagcttctccttaccctctcctgcatccttggtgttgacagtgaaggtggcgggtttgttgaccactccatggctaaggccaggaccataggcagtgacgtggccacagttaacataatccacatagaactgcagaggacttcctgaggcaggaatagaagccacatggaataccaccagccccattcacgcactagtcttttgttttagttttttgaaaaagggtctcatgtatctctgaatggctttgaactcactatgaagctgaggatgaccttgaattcctgttcctccaggattataggcatatacctcatgcatgctaggcaatcaatttaccaactgacctataaccccattccagcctgttctttctgagatggtagcaataggggacaatgatggggtgagaaaaaggcagtgagcccacctgggatgtgcatattgtcatagcggatgtccatttcatgcaggccagcttcactgggtgagtagcgcacagtaacagtaccatccttattgtcagtgatggaaggctgagccaccttgcctgagggcattcgaacttcccctacagaataatggttttgaggtcaggacaggtaattggcacacctagcatcactggtttccaagttccttcccagccctcactcaccggtgatctctcccttcttgatggtaaagggaatgacaagatcaaagggcctcagggtggtcacatccagcccattaacacccaccatgggcctctctgaaacctgtggtggagaaagaaaaaccaggtgaggaactacaagaagatctgaggtttctctgcacatatggtagaacagggtcacatgagacaccaagatggccagctccaagtgtccctatgggtcaggaaaattaaacaatagaccaggctaggccttacccaggtttgctggctaccctgaggataggtatactgtggagccagctgctgagttcgtagtggggtctgcactgtgggttggtccccagccaaagcctgcagggcaaagtgggagagctggagacttttgccatagaggggcctggaaggacagactaggactttcccagatctccctgcccacccgtccttggccccttctcactgtaacttggaagggactgttgggcacatgctcgccaccgaagcgcacacagatgacatatttgcccggctggggagctgtgtagaagatgtcaaaggtgccatcctcattctccaccacgtccacatctacctctgagccatcaggtgtgcacacagtgcaagtcaccttgcctttgcctgctgctttcgtatccacagtaatcactgtctcctccccaatctggatggtggggccaataccagcacctgggagggcagagtggatccccagaggggagccagcaggtgagcctagcatttgagctactcagcctgccacccattcaggtctcttattgctacagtcaagcacagccagcccgtacccctagcccaacccataccccaagccaggatggtgagtggtttctcagaaggcaggaaggattcttctgaccacctcaagcctctttatgagagaggcccaacaggtggcactgaggtacctgggaggaaaagtaagggaccatcccatcccagcacaagcatttactgccacctcctttgccaactctgcctcacctggtaccatggcctatgctgacaaaaaccagcactctggctaggcccatggctacctgcgcccctgtggcctggccctgagacccagtactataatgtgtggacgcagtgaggcggagtcctactgcagtgtggggaatgtgacactttcctccctatccacccccgaggcctgaaggtgaaactggagtttcctgacgactgagaacgcttgctcaaccagaagcttgtagtgagaagcagcccagcacagcctggcatagacaagagcaagcagcagggaggcagcagttagcacccatgcaatacatcacagcaggcttggcaaagcagtgacagtactcaaggaacagaggatagaagacccaagccaccacacagggttgcaagggtaaagcatctaagtagcctctagggccccatagtgcccgaggaaagggaaacgacggtgacgttatgatctggggctcagctgtagaggcttgggagctgtgggttgtaaggcctggcagcaagagcacccctgcagcccagcctcccacaaggaaagcagctaggagcaccaaacctacttgaggaccaagtttaaggactgccccttttaccagcctgccaccaagtccccctattgaccttagtctcacactggcaacatgagattcagcatctttagttatagtcctggctgcctgatacccatgttgccctataagtttcctgcatgcctgccttgtatcatctagctaatgacttgggccctctcctgacagctacttaattcctcatttctgtatacagactctaggttatcagcaggtcttaaccatagcatccttgaagtatactggttaatcaggctatttactgcttaatgtcccaatggctactgacctggcacaagccaaccttttggcttgcccaaaggtgatttaagttcccttactgggctgcctgcctccattccacacataatggtcagaaaaattgaggccactccaagcccctagcctattctccccgctcctgccctgtgtacatatatgtcatctccaattccatgtgctgttctacaaagcaatctagcctctgccacaaaaacctagctatcatataatcctgtccttggccacctacccaagttccaggcctacagccttcagaagcctgtaaataattgtagtcttatcagtatccctggggtgtctctgtcttggggcagacaaacctgtctaatagggactgtcttaactaacgtcactgctgagggaatagaagagaaggaaaggagatgggtcgcaggaatgcactttggggttctgaggctgggccaggccccaccatgctggccacccaagcagttgagaatgcactacaagccagccccacccactcatgcacctccctcagcccaggacgcagatgcccctgggaggcagggatggaagtctgtggatctgatgagggctagaagactcccactgggtggaggaaaccaccttgttccctgagcccacacaggagcccttgtgagaaggaagcacctgttgcccatccccagaggtgccaagatccccagacccccaaagtcccagtggggtgcctcctaggatacacttcaccccaaagctctcagctgcaacccgagttctcagatggggaagtggaggcccagagaggggagaaccagagcactcatgagtagctctagaaacctccctgggccctgaccctccagcccatggccttgtctgcacagcctcccccactctgtccttgcctagagctgcagctggaactgtcctgggaatgaattagcaatgaagaggaaaggaaactgcctctctgggcagaaggggcattgggagtggccccagcaagcagcttacctagcccgtgacctccgattgacactgaggtgagagggcagagagcaaggagaaaggtcaggtgagtcactcaagggggcggcccccactcccacacgctgccccaagcagcgagcccttgcacacaggcacacccaagtcccgtgcctagtgccacgggggccgatagcaggctggctcacctgtgactgtgcacttgctggcatctccagtgggcacagcccggacacggtatggggagaaggggatctcatcaccaccatatttgatgaggattgtataccggcctgtcacatctggcacataagccactgtgtatgtgccatcatggttgtcttggatgtgtgttttcttgggcttgccttcagggtcctgtgtagcaaagcacaggggaggtcggtccaagccagccttctatagaaacccccaatactgctataacagggatagtttctggaccctctatccccatggcccctgaggctgcctgcatatagcagagtccagaatggaaacctcccaaacatacagtattctgtgacatgacaaaagagtagcttggtgcccagcctcagcactaggagcttccatgaaagatctcaatgttgtaacattacacctgtcctgtgagaatattacatgtgaagaagctgaaacactataggctttagcaccatgcttaccaatgaatgtgtatttgagatagtttgttcctttcaacttggagaaaactgctacacatcctaatgtagcagaccagaagcagaggcccttcccttacaagtacaactccaggcagactgggccacctgcccaccacagctctatactctatatgcccaggtcttattcctcgcctctcctccctatgcctggagatgcagtacagcccaggaagccagcaagctcaccgtaatctggacagccaacaggccctccccagcatccttagcatcaatggtgaactccacaggcaggctggcaggcacaccagtggtgttgagtccaggtccactggccttcaccttactggcatcatgggtgggcagcaccttaaccttgaaagggctgtgggatcagggtgttatgagccatcagaaaagtttcagtactcagcctgcccccagtatacacagtgaaccctgcttcttacctccgtggcacctcttcttccccatatagcacagaaatgctatagggcccttctcggctgggcacatagttgacagtctgagtaccatccgcattgtccactacatccactggctccaccaggcctagccccagtcccaaggacagaaccttaggttggctccttgtacccattcccaatcccatctcactggaggattaagactgggtccaaagcctagaccttatcatgtccttaactacccaatttcaggaacaactccaagaccctgtagtataaaacatatgcatgtgtccttaggccctctctcttgacacatttattcagtggccaattcctgtcccttataccttctctagagttctacctggttctgtggttacctgaagcccttctaccatcttccctagcttccacatgttcccaggtatgtgaactcttacctttaggcccctgcactttgacttgtagtggggcaactccagccttgcttgtgtccacctgaaaggactgagggaggttggcacggaccatgcctgggcttaggccaggcccagaacacttgactttagatgcatctgtgacatcatgcacagggaccttgaagggactacctgggggttgagacaaaaggatggcagctatgtaagagactgtggatattagcagacagtcatacttccatcctcatcatcctctccttacctggcacttggtgaccaccgtaagtgacattaaggctataggtgccagcttcatagggtatgtattctacggagcagctgccatctttattatccatgcaagacatcttggcctcagagggaccctcaacagccaagcccaggccacctgtaccagctcccctattccaaacagacaatctgtcattacctgaagttcacaagcccataggctgcccttgccatcttcagtggctcactcacctagtctctactgtaaacttgttgggtttgttggtagtaccactttggatgcctggcccatggacacgcacacgggaggggtcacagccctctgttacaggcaccttgaaggggctgctgggcacagggctgccatcataagttacatccacagagtgtactcctggaagggcagatcaggaagaattgggctttctacactcactccctgccctatctaaggtaccacccccagcacattcataccttcctcatatggagtatattccactttgtatgtaccatcaccacagtcctgcacataggtttctgtcaggttgcctgaggggatggccacaagggccttcacatgtggccctccagtctgtgtaagagcccgggcatctacactaaactcagtggttgcttctcggaagacacctagaaaaggccacagtgaggaggctgtggctgtaggactctttgtaccctataactgctattcccctatagcaagcctccttaccttgaccctcaatcccaggtccatagcactgcacacctgaagtgtccacagcaggctccacctgcaacttgctggggaagttgggcacaggctggccaccatacttgattgtaacagtgtaagccccaggacagagaggaatgtaagtaatggtgtgtgtgccatcaccatgatcctgaatatatacttcagctggcagtcctgcctcagagcagatctcaatagtcaactcagcactgccagcacttgagcagtccacttggaactgccctacctcaccagcagtagcccgctccagcccagggcctgagcacttcaccttagatgcatcaaaacaaagaaccacatgggccttgaatggggatccagggatgtgggtgtcagcaaaaaggatgttgatgttgtagtccccaggctcagtgggcacataagacacagagcatgtgccatccccattgtccaggcactcaagctgtgcttcacaagggccttctactgtcaggcccaggccaccggtgcctgctccctttgtatcaatggtgaagcgggcaggggaacctgcattgcccccctgtagccctggtccaaatgccttcacctgaaggaaagaggagatcagacagaagcagataccagcccaactttcatctacctccttttgtcccaactttcctcctcacccaaagagagacagaaacaacaaagggtcaggacaaatctggagaaaatagggcgccttcagaaaggaagatgggagctgagtgtggtagtgcatgtgtttaatcccagcacttagaactcagaggcagacagatctgtgaaaggaaggaaggaaggctttcccttatagactcccaaaaacacttaccttactaggtttggtgggagccacagcttccagtggaaagggactgccaggcacaggcacaccatcataggtcacctccacctcatagggcccctcttctcggggcacaaagcgtaccacactgttgtcagctcctagacctggctccactttgcaggacactgctgcacctgagggactcacaatcttggatgctactttgccttgaccacctgcaccctttgacttcactgtgaactcctgatctctgccaacatccacttctgttggaatgatgaaagtagggaaaaacatcaaccatcatttatttatgtagccccaagaaagactcagctgggtggggttaagtgttcctcaatgtcaatggcaaatatagcgactacttactgtcaccaaggccagacaccttgatcttgctgaggtccaggcttggagatactccaactgaaaatggactcttggggatgttatctcctccataagtgacactgatacctactgggccctgaaattggtaagaagagcaggggtcactaatcagtactccagtgtctttggcctacagttgcccagtttaagcaagtgtaagagacactagctttgttcctcagcccccttcccaggtgacaaattataaacttctttcagcagcctacctaccctaccatataaggaagggtatggctgcagcaagtgaagatacctacctgctgcacaggagtatacttgactgtgtaggtattatcatggtggtcaatgatgtccacatctcgcactgcatctcccttagccagccctgagaactggacatccagcttgcctttcccagcagttttagcattgaccgtgaaatgggtgggtttgccaagctcaacacctgaggagacataacaaaattgaggcactctactcttgagttccctacccttggttctactcaaccttctacagaatactcatccttaccagtgcgacttaagccaggaccctcagccttcaccttgctggcatcatgagaaggctccactttgactctgatggggctagtaggtgtggcctgcaagtgatggaaggaaaatagctgaagacagcagtcccaacacttagcagtctagggcctggaagcaataacacctacctggtcagcaaaaaggaccatgatggtataactgccagccccacggggtgtgtattttacagtgaaggtgtcattgtcattgcggatgatatcaaagtcaatatcagcctcagtgggacccaccacaccaggggcacacttgataccaatgctgacatctcctgtaattgagaagtggggtaagaggaggctaggacttcatggagacagcctacccacctgtcctcccattcaagactaggccttaccctggccagcctctgtacaatctacagtaaagtaggtgggttcatgcgccttgagcccagtcttggctactcctggaccatacactttgactttgtttgggtggctgccagctcccacattcacctgtagggtacaggggcaagtgaaaagatatgacatgtctatgacaggagagatgagaggctccctcaactactactggtagacaggccaaatactgctgctaccttgggacaactagaagttcctcaaacagataaaagtgactgcatgatgctgtcattctactcctacagaaacaaacacctaggttcacacagttacccaaatgtattcacatagcccaaaataacacatatcgactaaatagcattttccatctatacaatgtgatatagaaagtattcagccataaacaggtatgaagtactgacatgctacaatgtgaaaaaaacttcctatgacacttagtgaaaaaaacaaacaaaaagtcatagagcaaacatggtagtacacgcctttaatcacagaacttgatctctgtgagttcaaacccagcctggtctacagagtaagttctaggcctgcttagtcttcatggtgagatcttgtctcaaaaagaaaatacacacacacacacacacacacacacacacacacacaccaaaaaagtcacaatgtgtttgtgtataatatatataattataatgtatataattgcatcaatgtgaaaggcccggaaaaggcaaatccatagatcagtggttgccaagggctaagggaagttgaaaggataagagtttctttaagaataacaaaaatgttttaaactagactgtggtgatatctgccaattaccctgtaaatatactaaaactcaagttcactgaaaatgtcaaaactatattggtatgcaagcttgatctatttaaaaactgctatatgaacaaaggggttctggggaaatgggctaatagcccatgggctggcttaccctgaagggactgttggggatgctgacacctccccaagaaaccatggctgtgtgtttcactggctttctgggcacataagagcagctataagtaccgttgccattgtccttaactgtcgcgtccaccgggcagccctcattgtcctgtaaggcaggcaaaagcaagcagcctgctggtcagtacccagggctagaagcctaccagtcctaccccaacatgggtaggcatcccacctggacttgaactcggagaggagccttcccagcatgcttggcatcaactatgaactctgctggcttgttgacagccacaccagtcttctccaatccaggcccacgtgccttcacctggtaagaaacaatctaatctcagaacaagacaaggccatcaaagtcagacagggcagtaagtaagacatagaatggcaggacatggttctgggaataccagccagggtcggagctcttgaccccaatctcactgacaaaatatgataatgcccatccccaaaagccttcttaagcaaaagtagaaggccaaggctcaagtcagtgttttgtgccctttaccctgtctgggaaaaaatcctggggtgcctcacggatgtcagccatgaaaggactgagacggatgtcctcactgttacacagcacatgaacagcatactcgccagcctcctggggccaatagcgcacatcacaggagccatcacccttgtcgtcacattcgattttggcctgtgatgggccttccacggagaaacctgacaacagccatcaatcctattggtgcctggagccttggggtaggcttcccttgtcaccctctgcttcaggtgcccactctgaagcctccaacttacccaaggtgcccacatcatcaccaatggcctctaccacaaagtctgctgacttgccaacaacaccgccctccagtccagggccccaggcccgcaccttctggttaccacactcagtgcccaccttcacttcgaagggactacaagcaagaacaccacatacgtaagcaccaagaggcactgccctgtgcccaacagctgtgagcaaggcagaaagatgccactagtccctcaccaggtagggagatgggagggctcagaaatggttagtagtggagggaacttacctgcggccaatgttctggccaccccatgtgatagtgacagtgtatgtaccaggtattgtggggtaatattcaaagccatacacgccatcccctagatccttctgttttacacgctcctcaccctctgcaaagacaaggaagaactcaggcctgtctaactatgacctgaggtccatcgcccaccaccccaccagacaaacttactggggccctttacagtgacctttagctccccactgccagcgccctttgtgtacaccttgaagtcagctgtctccttcactcgcacacctttaggctggaggcctcgaccaacagcccggcaggcagctgggttacaggctgtgggcaaacaggccaactgagttgctggaaactgggtctggttgtcccttcccttgctataccaagccagaccattgtgattggagggctcctcagagtttggcccaacaggctggtaaggcacatgcaagaaagaaccaaaacctacaccccaagtagggacatggcaggctttctcccaactgttttgacaccagccccaatacctccacccacccttccccaccaagagaaagatatatccaaataccgttgaccccgtgggcagagcagagagcagcaggtttctagacagctggagccagctcttcccaaagcaaaagcatggaaagaagagacaagagggacaagaaaagaaagagaagcaagaagggccccagtatggggaaggaaagatagtgcttgcccagacagtagaagctcagagactggggctcccaaacaagggcttcagtggaacagctccagtggcctaactctctcctgggaggcccagaccacagcaccacagtagagaagcatccatggccaggcctaccttggccaacagtgacagtgtaggggcttcgagggatgggaacaccagcaaaggtgacatgcacagtgtggacaccctccatggtgggctggtagctacagcgataggtgctgtcacccctggcctccagctgaggctccactgtgcctttctgtcctgtagggtcctggatgatgacttccacctctcctgtgccagctcctgtcccaaggcacagactcagctctgggactccagcacagccacccccaccccccctcccagtggctggctaggcctcagctgccttcccttacctgcagtgaagatctcaaagtaggtagtcttgttggcgatattgccgctaggctccagaccagggccctgggcagtcactttgctggcatcaccctgtgacttgtccacatatacctcaaaggggctcttggcaatatgttggccagcaaagagtacagtcacctgtttccagaaggggcaggctgtgaggatgaggtaaaggaccccctgccaactacccatggctaccagcatccttctcagccaaagactcaccttatgagttcctgtcacttcaggaacataccaaacagagaaggtacggttcttgtcattattagcagtcacttttgcctatagtggggaagggccaatgagtgttaagagcacccattctaaaatatgacacagaaggatcctgatctgtcaaaggataaccctacctcttcctggtgtccagctgggtcttccacatacaccagcacctctccctgaccagcacttcgagtctccacagtgaattctgctctcttcttcaccatattgcctgtaggctcgatgcctgtgaggagagggtgaggaagtcatggatcagctggtagggccacacctttacttctataccctggttcccagacactaaagcagtaacaaggacacagcattagagatcctatccttctgcaggttcagtgcctctccccaagccagcctctccccaagacaggtacaatccaatctggcagctttgttcaatgtaaacccagtatattgagtctggcctcagaatccaactgtgtgtgctcttgccaccaatacaggcccatgtctattttctagaacagtctgatttgctgcactgttttcccaaacccttgcacttgcatggtcctgactgcttcatctccaattatagaatagcagcgcagtaggtcctccttcaatcaaaaaatttcctacaagccagtatcacttatggaacttattagcattcccttgtcaaggtaccatgacaaccctgatccattcatccccctcaagagtgattatttcattgcccagctgccatgaacctcttaggacccaagatgagagagaatactatcctatgagccagatttaaatgctcagccccctgaaatgtcactgatcaggccccctcacctggcccataggctctggcttttttggggttcagtttgggccgaagaggagctcctggtttcagcttggccttggggaactgagacaggtaggtcatgacagaatgttcatctacgttaggatccacaatttcctctggggtgatcacctgtcacagacagaagacaagagcaattggacctctcctcaccatgactaagcaccccttagctgctggggctaatgagtgagcatacctgaggaatgcctagccagtcatcagcctgttgcatggcttctcgtgcattgttcacaggcttactagcatcccaggagtcccagtcaggacataggcctacaacacagaaaaggtcatgttatgagtcccggacctataggagcaccttctaggttgacaagacagccctagcccaagatctcccatctctgtgccccctcacctggggcacaactatcaacaagagcacccagggcccgtccactctgccagtcccgactgaagttggtaatgggcagctgtggcagcttgttctgaatccatcctagaagcctctgtttgggtgtttgcttcttggcctcctcatcctcctcttcatcccacatgggcattgagatagagtagtgcaggatcagggtccagatgaggcctaagatcagcttcagattcccatccacaatggccttgctgtctgtgggaagaggggtggcaacactgggcagttagagacttccctcaccaaggccagtagggagggacgtgggcagacaaggacagcaagtgaattaggtggcagaggtccctccaagataagggtggaaagtggatcagataccctctgtccagagcctctaaaggggtgcaaggaaatatttagtgataaaggggacttttgggagagaggaagagatccatagacacatgatgacaatacaatgcaataaggggacattgccaaaaaccccaaggcccagaaggagggtgggagaacaagtgagatgaatgctttgcagctgctgggatcaagacctgcccccctacctcttgggatatatggaaatggagggaagtgacccagccctaactggcctagacacagggcccatgacctcaagctgggctgggaccaaagaggaaggctaggttggcaaagagtagttaggaaatacaactgctgctccagggtgggggatgaggcaggggaagtggaggtgttggcaaggatccttgtgtaaaggggtgtgagccccacccttttctacttccttacaccccccaagctaggagtcaagaggtggtgcaaaagaggactggctataagtcaaaggaactacatttggtcctgactcattgagggctataggaaacttatgggataacagcccccattgcccagttgaaggaggaagagtagggagggcctggcttagcctgcctctagttccaaggctcacttgggagccctggttgtagaggccttgggtgtggtcctcaactcctgctgcttcagcatatcctgcttagctattatttaccacccagcctacttgccgggtcctcaactcctgatgcttcagcatatcctgcttagctattatttaccacccagcctacttgccacctaacgggctctcaggcagccaccagacttaccacaagggaagtggttagggcgggcaccctgaacacccatcaccatggcaactcctctgagccccacccaaggccacctctaggttttaacctcctcaagggtgagtggctttggtgggtagggttttctatagctcatgtttggaaaccctacaggccttccttgtaatgtttatctagcgagtcaaaggaggtaggtcatgaaaactagaacaccactattgggagggccatctagagcaggtggcatcccagtccagtggaacagcacctggaggactaccacttaagcctctcaaagcagagtgatctttcctttccctaacaggttagtcctggcctcttgtgcatgttttcattgtcccaaaatggtgagaggatgggagaaggaagttcaaagatcaagggcacaatgactctaccccaagtcacaggccagcacaaggaaatgttaagtctttagtggcttccaaggggaggatcaaagactgacccaccatgcaggaaaggtacagctggtccctctcctggtccgattaggctggctatgctagctatgtccccctcccaagaggaggaggggaccagggcccaggattgggaagctgcctggttagatggccccgccccatcccaccccttatccccagccggccccctccctctcctaatcactgctgctttccaacatttttttgccttatatggcaaagctctgggaactaggcctgctccagccaactcacaaggaggagggaagaaggaaggcggggagaccccccccaaagagatgggctgtggcctgcctccccacatccggttgacaccccccacaaagactcagaaatgactcagctggctagactgaggctgggactaggggtgggcctccatacatccactagcatgcctctatgggcattccaaagaaagtactcagcacttgaaacctgctctctgagggaccaggagactcttggtccctcactgatttagcatgttccatcccaaaggagtaagtataacagaaagccctttatattatggagaaaaggtccattctcctactctcctgttccacattctagggtctgtccatgagcagtccctactttgagaaaggcatgggatccttcaaaaggcaagcaataccaatacctaactctgcagttcagtgaaagcacaggaaacccagtgtatactagggcacctttcaaccaatatctgcattctagatacagaaaaacaaggtctacatggaagtaagagttttgattcatgatagataggaaagctggcaaccaagcacactacggccagatgcccaggtgccttcagtcaaccacacccaacacacctggggtgtagttttgcctgcaatacctctcaatcctactcccagtttgccagaaaagatataaactggggatttaaaccacctccaacgggggagcatgttccagggcaagaaattaagggtgtcctacaaaataggagccacaagctgtatcctccactttagaggcacctaaaggctagaagggtccttttcataattgctgttgtagggggagagcctggacatcccactgttcaaggatggggtgcggctctcggacagaaacctagtctgtgcctgtcccaccacgagtgcagcgttgggggcgcggcctatagaggatgtgagctcagcctgggagaaggccaggagggcgtagcgggcgggggcgcttagcggttcgcatgctcctcaggccagcctgcttgcctttgttctcgaggactcgaggagctaggcggctaaaacgcctaggggtactcttcgttgtgcggtagctagggaggggagcctcnnnnnnnnnnnnnnnnnnnnnnnnnnnnnnnnnnnnnnnnnnnnnnnnnnnnnnnnnnnnnnnnnnnnnnnnnnnnnnnnnnnnnnnnnnnnnnnnnnnnnnnnnnnnnnnnnnnnnnnnnnnnnnnnnnnnnnnnnnnnnnnnnnnnnnnnnnnnnnnnnnnnnnnnnnnnnnnnnnnnnnnnnnnnnnnnnnnnnnnnnnnnnnnnnnnnnnnnnnnnnnnnnnnnnnnnnnnnnnnnnnnnnnnnnnnnnnnnnnnnnnnnnnnnnnnnnnnnnnnnnnnnnnnnnnnnnnnnnnnnnnnnnnnnnnnnnnnnnnnnnnnnnnnnnnnnnnnnnnnnnnnnnnnnnnnnnnnnnnnnnnnnnnnnnnnnnnnnnnnnnnnnnnnnnnnnnnnnnnnnnnnnnnnnnnnnnnnnnnnnnnnnnnnnnnnnnnnnnnnnnnnnnnnnnnnnnnnnnnnnnnnnnnnnnnnnnnnnnnnnnnnnnnnnnnnnnnnnnnnnnnnnnnnnnnnnnnnnnnnnnnnnnnnnnnnnnnnnaggcgaccaagttctgcttcagggagggtcattgagccccaaagagcacgaggaggtccggcaacatctgctaacagtacaagaaacggacgctagagctgggaaaggctgagcaattctggcacacaccaattctggcacaggattgctcaattccagctggcacgcccttacaagggactctctttcctcaaggtccctgcaggggatggaccaatcctgagagcgaatcctttcagacagcctggtactgctgggaactctttgtgcacactagtgccaagaaacagctgcgactcagggctctcatcacctaagtagccacccgcagacccctggcccgccccacccatcttcgctggtcttctcagtctctgtggccctgcctgccccctagctccatctgggaggaaatggggcaagcaactgggccagggaggctgccagcactccaggaccaagaagccttccaaaggccccgagacatgccagtggtcataatcagaagacacccaccttgtgatgcgtgtagacgggtacactttgtgcctgtctaactcacatttccatccacctggggccctgaagagttctgcagtagagttctcgtctggcacagtatccccaaggtttggtgtgaccctagaggtgtggagaggctcagggatagggtcccagattactgaaaaacaatcagcaggcaccaaggcttgctgaggagcctaggttgtgttccctgagtgggtatgaagctattcacttaaagttcattttatgatagataattctggggataatgatgaggatgctgtactgaggcagaggtgagcaaaggcacagaggcaagaaactgtaggagacactcactaccaccctccagttaagggaattcgcttacctttcccatgatagactccttccatctacattctctgtacttcaagcctctccagaatgttcccttctgtgtttttccagaaaggcaggcctttatcactacttctcaaattgtagcaatgatttatcttctgaaagactggtggttgaaggaggccttgggctggccaacatggcatgcccaaatatggttggctctcctattgcttggggtgtctgcattgcctgtggtggggctatggtaaggttatattcacaatgggcaccacctctgcctcagcatgttcatcttggtactctctataatctcacccgtcaaataacattttcagtatggaactcccctatcctacctccagtcacctgcatatcctctcttttgttttcatatatacctgcatcaagtaagccaaggggagagttgagggacaggatggcagaactgagagggggtaacccaaatggaaaatttaagggctgtcattcaagacataattagagttatctttctgattaccctgacctactggagagtaaatccccatgtatggaattgaatcaataatggattttccactgtgtgccatttgtctggatcacctgagttcactaattggcaggaaacaaggaagacggaatcatagtaatggatcacacagaagttgggagtcccagcttccagccctatgatttggctatttcgggggtaggggtgggggaggggggagagttcttggctttagagtggacacagtgccaccaccagatgtcgctccatctcaaagatccaggggcagctccaggaagccaaaatccagctctttcatattttcccttatttggagtagattcttcgatgttaggcacaccccgcccacctctcccacccccaccatcagaccctaggccaggccctcccatagggaactatagacccaagcccaccagctatactaggaccctgaagagcttttctagacttgtgtagccagggggcgccaggagggaaggaagcagaaaatccctagagtaaaaccagtgcctgtaaggcaaattcaggtgtgacaagatagagaattgatttcctgaactttccaccttggccagactccttggagctgcaagagactgtgtgtgggtttcacccactttttctttcctgggatctgggaaccttggtgcttatgttctggctggcaatgaccgtcatactcagaaaccaacctgagacaggacccaagatccaggctggaaatctgtctcgctatacccctaccacagccccgaaatcagctccctatgtccaaactagcaggggactcatcatctcatatgtattcatatgagggtggactcatatccacccttgccattggctgaaaagtgtccttctaagttgccactcacccttatcccaatcaagatactagtctcaaaagacctccctcccacccccagagagtcacacaaagaccaattaatgggtacccacgcctgtacccatctcctgccaaacactcagataccagcccctctttcagggaccccccccccatgacctcgagctcacagattcctgagcacaaacataagtttgtggtaaactatgcaagtctggacactaacacgatgcctcggacctgagtccacacccaaactgcctggcctcggcctctctgcttgctttccaaacctttcccagctcccgagcgtcgcacccactatctgactactatccggtgtggagctaattacagagccctcacctgctgtccctccaacccctgggtggcgcccagctctctgcgctcgagccagaggcctcagaactcccctgnnnnnnnnnnnnnnnnnnnnnnnnnnnnnnnnnnnnnnnnnnnnnnnnnnnnnnnnnnnnnnnnnnnnnnnnnnnnnnnnnnnnnnnnnnnnnnnnnnnnnnnnnnnnnnnnnnnnnnnnnnnnnnnnnnnnnnnnnnnnnnnnnnnnnnnnnnnnnnnnnnnnnnnnnnnnnnnnnnnnnnnnnnnnnnnnnnnnnnnnnnnnnnnnnnnnnnnnnnnnnnnnnggaattgcccacagtcacagccttctgcctctgcccaagcctggtttggccacaccggtcaggtcttgttccatgggaagagatgaaacaggtaattgcagtgagcaccaaccgttcgttcctaaggccccaatgggtccctgagcactgtaatgaacaagcccttgtagctagctatcattgatttggttcctgctaggtgcagctgttggctgtgagcaaacaacaaaaatacattgaattctcaaagcaatcaggtgaagtcttaaagcctgggggtgtgcagtgtggtacaaagtgccaaatatctgtgaagttggtaggcacagccattacctaatattgtcaagctctctcttcctgttctatgtgcccatttcctggtagtttcagattcaactcaaatgtcatttcctacagaaaggacacataaagcaatgccatttttaacattttgttattcattttacctgcaaccccaatatgagctacatttgcattatgccagtgtgcacataacatgaaattgaaatagataattgcaaattagattttccttttctgatgtgtgtgtgtgtgtgtgtgtgtgtgtgtgtgtgtgtgtgtgtgtgtgggctgggactcactctgcagctcaggctgatctggaaatcactatgtagcacccagactgggctttgaagtggcaatccccctcccaatttctgtttcataaatgttggaataacaggcctatttaatttgttttcctactcaatattatcaaaaagagaaggtggcacatgctatatagtaagataaaagggagaaaagaaagaatatgaaagagcagtgagggggagtttgatcacatctccagagtcaatttagtaatctatagtgtaacttgaagagcaaagtgctggggtcccctccaggcactatgcatccagtgctacctttgttggctccactggcaatgacatttcacattctggcctcccaataagatcaagatccctcactgttctgtctagcaggagacctctgctagggaagccaatgaattatcataaattgctaaattagtggcttgatttcaagtttgtgaggtggcactagagtacatggagatgattgtctttccggaggataaacccatttacccacaggcatggtaatcagatcaaccggtaggcagatggaaggggcatgggggaggtagtgactgtgagctgcatttcaaagacatcccccacacacatacaaactgaatttgaactttctttactgcccctcccaatgcatacacatccaagaaacccaagaagggtctccaatttctttttcttttcttgttttttcttttttggtttttggagacatggtttctctgtggctttgcaggctgtccttgaactagctcttgtagaccaggctgctcttgaactcacagagatccacctgcctctgcctcccgagtgctgggaccaatggtgtgtgccaccaacacccggcattccagtttctttcaggtctatcaactatgaagattagttaacacagcactaactgttccttggtaaaaatcatgaattaaaaacattttcttgctggtcggtggtggttcatgcctttaatcccagcactcaggaatcagaggcaggcagatctctgagtttgaggccagcctggtctacagagtgactgccaggacagccagagctacaaagagaaaccctgtctcaaaaaacaaacaaaattttcttcctgtgttgaataaatgttttcatggtgacttttccttaaaactggtgggggggggtctggactgaattcagaatttaatgcatgccagccaaatactctaccactgagataactacctcccaagcctccactatgttacccaggtagccttgaattcaccttgtagctcatgcaggccttgaactttcaattctcctaactcaaaatcctaaatgctgagtgggattacaggactcacaaaattttcttattcttagaatgggtcacatatagccaggcggtggtggcccatgcctttagtcccaggactcaggaggcagaggcaggcagatctctgtgagttcgagaccagcctggtttacgaagctacacagagaaaccctgtctcaaaaaaaagggtcatttccaagattttttttcccaaatagccacacctgccaatagctactccctcccaggaagaacttccgagagacctacagaatgccctgcatacatccttctggcacctctgacaaatcctgagtgaggtctgaggccagacttttgtagcacctagatgaccaggtacttcctgtggagaatatttccatgaatcactcaatttggggctattgcaaaagcctctttagactctgggatcttgattcttctgctgaatggtagagaagggagttacactgcaatggactagacttaagctccaggtttgtgcaagaaaaccacagttcagattcctgataacatctgtgataggattttatagtgggatagtgaggggattaagaggcagtgtgctgaggcaggtgcagagggtgatccttagggagaaggcaaacctaaaattccttgacctcataaggaagcaacttgattctgtagggggggcatagggtagtactgagcaatcactctgtatgcagaggcctctgggagaggggccagcatagggggagggaaatgctgggaaatctgattttgccaaaactaaaaaatattcatgaagcagcctctgaatggacagaatgtctctctctgccctactctgtctctcacttacacacactcctgcccaaggttctcctgtctcttcgtaagacagtatcttttccagggattcatatagctccatttccagggacagaggagggcactgtcttttaaatccattcaacaccaacccttcttcattaacgacttttttatgtggtcaaaacagggctccttctcatcattgcctactttaaacttccataaagaattggcctgtggccttcacctaaatgccatcaggtcagcctagaactgatcagaacactcactatcactatcatttaagacagtggttctcagccgggtgttggtggcgcacacctttaatcccagcactcgggaggcnnnnnnnnnngtgagttcgaggccagcctggtcttcaaagcgagtgccaggataggctccaaagctacacagagaaaccctgtttcgaaaaaccaaaaaaaacaaacaaacaaacataactatagaaaaattatagttgtgaaatagctacgaaaataattttatggttggggtcaccacaacatgaggaactgcattaaaggtcacagcattaggaaggttgataaccactgctttaagagatcaggtatcccaggcaccttttctgcatgtacccctcctcctaagtctgtccaataaggggcagcctacctagttccagatgactttgtgtagaacaataaatacatggtcactattcgagataacctttgtctgatacagatcctttgtaagccttaattgattcccggtttgcctctaggttgtgcaccctgatggcctccaaggtcataccaagtttaggggttattctactctgccaaacaagaactctactgcagaactcttcagggccccaggtggatggaaatgtgagttagacaggcacaaagtgtacccgtctacacgcatcacaaggtgggtgtcttctgattatgaccactggcatgtctcggggcctttggaaggcttcttggtcctggagtgctggcagcctccctggcccagttgcttgccccatttcctcccagatggagctagggggcaggcagggccacggagactgagaagaccagcgaagatgggtggggcgggccaggggtctgcgggtggctacttaggtgatgagagccctgaatcgcagctgtttcttggcactagtgtgcacaaagagttcccagcagtaccaggctgtctgaaagggttcgctctcaggattggactctttgcattgctgtggaacagactgcccctgaggaccctcagctctggaagatgagggaaatgaagatagaggaggagggtgcaggattggggcagagttcaagnnnnnnnnnnnnnnnnnnnnnnnnnnnnnnnnnnnnnnnnnnnnnnnnnnnnnnnnnnnnnnnnnnnnnnnnnnnnnnnnnnnnnnnnnnnnnnnnnnnnnnnnnnnnnnnnnnnnnnnnnnnnnnnnnnnnnnnnnnnnnnnnnnnnnnnnnnnnnnnnnnnnnnnnnnnnnnnnnnnnnnnnnnnnnnnnnnnnnnnnnnnnnnnnnnnnnnnnnnnnnnnnnnnnnnnnnnnnnnnnnnnnnnnnnnnnnnnnnnnnnnnnnnnnnnnnnnnnnnnnnnnnnnnnnnnnnnnnnnnnnnnnnnnnnnnnnnnnnnnnnnnnnnnnnnnnnnnnnnnnnnnnnnnnnnnnnnnnnnnnnnnnnnnnnnnnnnnnnnnnnnnnnnnnnnnnnnnnnnnnnnnnnnnnnnnnnnnnnnnnnnnnnnnnnnnnnnnnnnnnnnnnnnnnnnnnnnnnnnnnnnnnnnnnnnnnnnnnnnnnnnnnnnnnnnnnntcgcaccccctgaccgcctcgcaccctgtatctgaccaggctccactcgcaagctctacgaaaagaaaatcttcgagtacgagacccagagacggaggctctcgccccccaactcgtcatcctcttcattctcttacaggttctcaggtgagttccccgccgcagagcctggctgagctgcttggagacacaaggcttggggagggagggtgtggctgaagcaattgagggaatagagggatgcctaatggtctctacctcccccttaatgcagacttggattcagcctccgtggactcagacatgtatgatctgcccaaaaaagaggatgccttactttaccagagcaagggtaagacaggtgtggggtgggtcctttatcagggaatttgggcacagggaaacctaagacttcaccccagttctcaatggctctagagtggagaaactgtcacagcacacacacagaatttggggccatgaggtcactttctcctttaccactgtttttccttcccaagaatataatgacgactactatgaggagagttatttgaccaccaggacatatggggagcccgagtctgtgggtatgtccaagagctttcgccagccagggacctcacttgcagatacccacaccttccatcaccaggtgagttgactggcagcatatctggatgtagtctgagaggatcctaactgggtctggataagtccaaggagatattaggtacagagagtagtccttaggcggtcaaatagggttagggtcggcatacagctgtttgggtcagagttctactttggggcctccaaaactgaagatttaattactttgccaggcagtgatggcacatacctttaatcctatcactggagagtcagatgtagtcagatttctattaacttgacgccagcctggtctacagagtgagttctaggacacccagagctacaaagacaaaccctatctcaaaaagaaacaaaacattaattatgtttatgtgtctgggatagtatgcatgagtgttggtgcatttttaaaaagtcttaaaaaaaaataaaaaccagaaacccaagataaagttgcatgacatttttaaaagttcatttgtcccatcatctctcttttcttaatacaaattttattctgtagctggagctacaggtggttgtaaactccctggtggtgagtgctggacactgaactcaagtatccagccgatcaaacaaactgttttgatcagagcacatgtagcattctttgcactctagtctgggatctagttttaagccttctgagaataagggggaataaaaggatgctgagacagagttgacaggtatagtcactgagtagcaaggctccacaggtaaaaaggccacagatcagaatcgttctggagggagggggcaatggtctggcttctagggtatgattagagtaggctggtcagagacatttttgggaaaccacccttcccccaattcctaacccctgttgtcttgcaggttcgtgatgatattttctcttcttcagaagaggagggcaaggataggtgagtagtgaacacacataaggacagggacaggtttgggcctcaggctctcctgcccacttgtttccttcttttgccacagggaacgccccatctatggccgagacagtgtctaccagagcattgcacactaccgtcccatttccaacgtctccaggagctcactgggcttgtcctattatcctacatcctccacctcttctgtgtcctcttcttcatcttctccctcttcatggcttacccgacgtgccatcaggccagaaaagcaggctcctattgctgctctgggccaggatcgtcaggtcccactctggggccagctattgctcttcctggtctttgctgcctttctgctctttgtttactactccatacaagctgaagaaggcaaccctttctggatggatccctgagagtattggtttctgagcagctcttaacaagagttttggctgattgccttatcagtgtttgctgggggtagggtgggtgagggctttttatgtgttctttaaggggttcagggcctagcctagggcagtgcttatctcccacctcctcctgccaagaaggcagcaaatgctggccttccacaacccattgggcccatatgtaccttcctctggagcctcctagtcctattgcttctgacccttagggctccaggagataagaccccacttctttagaggaaaacttggtggaggtgatggtagttgtcatgcatgcctgtttgttgtcacccctttttagggtgtattaaccaaaggccaccctggctttgtttttgtggacacaataaaaaacacatttatttttactttgttggctcttcctactggggtgggagttgggctactgtggcacaagtgcttagtcttgggtctcaaaaatcactgactttaacctttggttctacattttagtttgttcttggggaagggatccagtgttacccaaagataagtctatgttttcgttgtgggttttatttctgggctcactccctgaagcacttaacaactacttacaaaataactaccatgtaaccaaatgtgcccatgggaaattcaggcaaaactgcattatgatgatacatgcaggcactttagccaggagaggctcatgccaatatgtgaagttacaaggttagaaaagaaatgaggcatcttgccagtggattttttgctcagctcctgggattgatagttatttgatagcatgggggtagatagaaaaactgcaggatactcatcctaattctttgcctgtttattgttgctcagtttccaggtcttctgtcctggatacatattacataatataaaaaagtttttatccaggcatagtggtacaaacctttaattccagtatttgagagccagagacagaaggatcactttaaatttgaggctaccatgatctacatatcacagttccaggacagtatctcaaaaagaaaattttaaaaattaaagcctggactgcagagataatgtcatagtagttaagaggactggttgctcttccaaaggacccagattcaattcccatcacccacatggaagctcacaactatagttccagttccaggggacccaacacctatggcaaaacaccaaaagttcatttgtcctgtcatctcttaatacaatttttattttattagggttttttggtgtgttttgttttggtttttggacacagggtttctctggctttggaggctgtcctggaactagctctgtagaacaggctgatcttgaactctcagagatccacctgtctctgccttctgagtgctgggactaaaggcatgcaccaccactgcctggctttttgtttttgtttggtttggttttggttttttttttttttttttttttttttttttttttactttctaaaaacacaaaaagattatttccattataaacataaaagttttgtgaatcatcccctactttcctttaagttagaggtttacattttgttgtaggtagcaaggcatcctaaagtgatgtgtgaattagtatataattttcatggcaggctctcattttagctcagtatgtaaggatagtgtcaccaatcctaacaatgagaattcctacaagttgtcctctgacctccacataaaagccatgacacaagtgtgtccatagaaatgcatatataaataatgagggacaggcagatctcttgagtttgaggttacaggacagccagggctacacagaaacctgtctagaaaatatactcttcaggcaccatgatatatatgcaggcaaacatttatgcacataatattaaaataataaaaaggtttcctgggggctctgagccttctctaaggctctctagcaacctgtctaggcacctttcagattcctgaggcctctcattttggtttggtcctcaatatccaagtcttgtaagagctctgaggttccaactccatgcttcactgaatcttaagggttgtgttgtctcagaaaggctaatgactacccagacaagaactaagtgttgtgccacaggcttgtgactgctctatagacctcatgaaataaaggctgccagctctgtagagctccagaacacactctcaaagacctaaggggcaacaataactccaatccctagaagtttccaagggttcagagttaccagtggtcaagacatctgagggatctaggactctagatccccaccccaggacttcagtagccaatggagacagcagggtgtaggtgctcaaagactgttccagacactaatcagcatcttaattctctccctctatgaccatgaaagaacagcctgtggaagtacaatgtgcacagtcaccatgattgtgtgctaggccctgatgaccagggaggagcctacgagctgaggatgcataatggaatctacagtgtggaaagaggtcaaggaaggcctgtgccctatagagcaaggcaagcacagtgtacatctgatggacctaacatataggaggggtctacccaaagggttcttgtgttttgttttgttttgttttgtttcgacacagggtttctctgtgcagctttggaacatttcctggaactcattctgtataccaggttggcctcaaactcacagagatccacctgcctctgcatcccaagtgctggnnnnnnnnnnnnnnnnnnnnnnnnnnnnnnnnnnnnnnnnnnnnnnnnnnnnnnnnnnnnnnnnnnnnnnnnnnnnnnnnnnnnnnnnnnnnnnnnnnnnnnnnnnnnnnnnnnnnnnnnnnnnnnnnnnnnnnnnnnnnnnnnnnnnnnnnnnnnnnnnnnnnnnnnnnnnnnnnnnnnnnnggagattgaactcaggacctctggaagagcagtcagtgctcttaacctctgagccatctctccagccccctggatccagactttctacacctagtattaacatgcttcatggtccagggatagctgttcacagaccactgcccaagagacaggcagatacaactagataaagtccttcccttggtccattggtattattgttgaaaagccaggatagagagtagggcccaacactctgggaacctcaagaagctgcccacctggacagggggttttctttttctttttgccttcgagacagggtttcctggaactcgctctgtagaccaggctggtcatgnnnnnnnnnnnnnnnnnnnnnnnnnnnnnnnnnnnnnnnnnnnnnnnnnnnnnnnnnnnnnnnnnnnnnnnnnnnnnnnnnnnnnnnnnnnnnnnnnnnnnnnnnnnnnnnnnnnnnnnnnnnnnnnnnnnnnnnnnnnnnnnnnnnnnnnnnnnnnnnnnnnnnnnnnnnnnnnnnnnnnnnnnnnnnnnnnnnnnnnnnnnnnnnnnnnnnnnnnnnnnnnnnnnnnnnnnnnnnnnnnnnnnnnnnnnnnnnnnnnnnnnnnnnnnnnnnnnnnnnnnnnnnnnnnnnnnnnnnnnnnnnnnnnnnnnnnnnnnnnnnnnnnnnnnnnnnnnnnnnnnnnnnnnnnnnnnnnnnnnnnnnnnnnnnnnnnnnnnnnnnnnnnnnnnnnnnnnnnnnnnnnnnnnnnnnnnnnnnnnnnnnnnnnnnnnnnnnnnnnnnnnnnnnnnnnnnnnnnnnnnnnnnnnnnnnnnnnnnnnnnnnnnnnnnnnnnnnnnnnnnnnnnnnnnnnnnnnnnnnnnnnnnnnnnnnnnnnnnnnnnnnnnnnnnnnnnnnnnnnnnnnnnnnnnnnnnnnnnnnnnnnnnnnnnnnnnnnnnnnnnnnnnnnnnnnnnnnnnnnnnnnnnnnnnnnnnnnnnnnnnnnnnnnnnnnnnnnnnnnnnnnnnnnnnnnnnnnnnnnnnnnnnnnnnnnnnnnnnnnnnnnnnnnnnnnnnnnnnnnnnnnnnnnnnnnnnnnnnnnnnnnnnnnnnnnnnnnnnnnnnnnnnnnnnnnnnnnnnnnnnnnnnnnnnnnnnnnnnnnnnnnnnnnnnnnnnnnnnnnnnnnnnnnnnnnnnnnnnnnnnnnnnnnnnnnnnnnnnnnnnnnnnnnnnnnnnnnnnnnnnnnnnnnnnnnnnnnnnnnnnnnnnnnnnnnnnnnnnnnnnnnnnnnnnnnnnnnnnnnnnnnnnnnnnnnnnnnnnnnnnnnnnnnnnnnnnnnnnnnnnnnnnnnnnnnnnnnnnnnnnnnnnnnnnnnnnnnnnnnnnnnnnnnnnnnnnnnnnnnnnnnnnnnnnnnnnnnnnnnnnnnnnnnnnnnnnnnnnnnnnnnnnnnnnnnnnnnnnnnnnnnnnnnnnnnnnnnnnnnnnnnnnnnnnnnnnnnnnnnnnnnnnnnnnnnnnnnnnnnnnnnnnnnnnnnnnnnnnnnnnnnnnnnnnnnnnnnnnnnnnnnnnnnnnnnnnnnnnnnnnnnnnnnnnnnnnnnnnnnnnnnnnnnnnnnnnnnnnnnnnnnnnnnnnnnnnnnnnnnnnnnnnnnnnnnnnnnnnnnnnnnnnnnnnnnnnnnnnnnnnnnnnnnnnnnnnnnnnnnnnnnnnnnnnnnnnnnnnnnnnnnnnnnnnnnnnnnnnnnnnnnnnnnnnnnnnnnnnnnnnnnnnnnnnnnnnnnnnnnnnnnnnnnnnnnnnnnnnnnnnnnnnnnnnnnnnnnnnnnnnnnnnnnnnnnnnnnnnnnnnnnnnnnnnnnnnnnnnnnnnnnnnnnnnnnnnnnnnnnnnnnnnnnnnnnnnnnnnnnnnnnnnnnnnnnnnnnnnnnnnnnnnnnnnnnnnnnnnacagagggcaccagtttgagtcatggtacctgccaaggactaccagagacagggcagtgtatgacagtgccctccgtgtccctctcctcatcgcccaacagagggccagtgtgtgtcctttctctgcaacacccataccagagaggactccgagatcaggctgccacagtcagtgagaggggcccaaggggcagaacactagcccacaacaggcagtcccaggccaaattaagtgcaagtagaacttgatctgtagccaaagcagagcccttgatttgagacagctggagaggctctgcttgtaggtgccaagagtggccacactgtctccaaaagaccctagggtcctacttgtgggcagggacatactgggatcagcttctggagtccctggtgtatgagacccttgccatgatgcttcagtacagctctactggaaacctagatggaaacagtggggtatgagggaacagctgctaagccaggatggatacattggtcaagttccagctggcagttgtcatgactgcctagctacagagaggcctgtaaagggacccatggccaaggcaccatgcaaatttgagagggcagacctaaccctatggtgttattttgtttgtgatctaacaaatgatgcttgcctgaaaatcagagaagcagaacgtccagccactaattatctctactgaatcttcagactgaattcgagatcctgtccctaagaatcttctgactgaatgctgtgcctactaaacctcagactgaatgccatgagctcttgtctcctcccaccttatattcctctctttgcccaaccatatcattcttctctccagttccctaattccgggattaaaggcctgtgacttccaagtactggaaataaaactgtgagcctgtttctctcttagactggatcaatgtgtaccccagggtggccttgaacgcagagatccgtgtacctctgctgggattaaagatgtgtgtcactgctgagagcccaaggacactcagcccagcaccctggctgaaagaatatctcatgaaccacaaacatatgcatgtaagaaaggcttgggatactgtgatcctagggttaaaaatttgcaaagcataggccaggcacttttaaacgacattcatccacaaaaataaatcttaagggttgaagtgaagggtcagttgttttctttgtttgtttgtgttggttttttttttttttttggtttttcaagacagggtttctctgtgtagctttggaccctctcctggatcttgctttgaagaccagtctggcctagaattcacagagatctgcctgcctctgcctcctgagtgctgggattaaaggcgtgtgccaccaacacccgggtgaagggtcagttgtaagagcactgttgttcttgcaaaggacctaatgccagttcccagcacccacatggggactcacaactgtcagcaactccagttccagatgggtctgacaccttttgtcctctgccagctcagacatgcatatggtgaacttacatgggtacatgtcaaaacaatcatacacatacaataaatggctgggtgtggtggcacaggccttcaatcccaacactctggaaacaggcaggtgggtctctgaaatggaagctagtctgatctacatagtgagtttcaggccagccagggtaacatagatgttgtctcaaaaaatgtttaaatgaaaaggagaacaaaatatataaataaacaataaatgcatagatgtttaaagtaaacaaataaaaaaaactgttggagaacagaagagccattcatgtggaaggcactaaccatggggttacctgccacacagcagttgggaaacagcagagtgcagtccatccagagtgagcctaaagctaggaaagcccagagggagttggagaatgacaagggaaaagggaaagttttgactacctgtgggtgactctgggagataatcttttcccatagcagtaagatgctaggtccaggctagaaccatgcttttaatttcagtactgtggaggcagaagcttgtggctgtctgagtttaagtttaatggcagcctggtcaggccagccaaggccacacatagtaagactttgtgtcaaaaacaaacaaacaaacaaacaaagaaatgacgcaagctaggttctcacttatcccccttcagctaaagaaccgaccacctctacaactgcataaataccaatcagggaaaagactggctggagacagctgtcttcaggggatagatggcaatgtgtggggatggagtactgtgcagaagcctacaggaactgtcccagggaagcaatatggaagagaagcagaagaaacctactagctctgggctggggctagagctcctaagcatgttggaacaagctgggcctgtgtatccgggggttgcacgttgagaactgtagggaaggaaggcttctagtccctacctttacttctagaaaagccaatggctttctctagagcactgtctgtatcatgtctccctcagtgattgttggccagacacgtgcttctgggtcagaacaatattttcctggtttcttgtctccttagacagtagtaaccttatatgggaaagtagtcagtagttagctgccaatcttcctatacacacccagatgtacattttgaacttgtcacagtgaaaagaagggcgtgcctctctctctctctctctctctctctctctctctctctctctctctctctctgtgtgtgtgtgtctcctctctctcctctctcctctctctctccttccctccctccctccctccttctccctttttctctgtttttcgagccagggcatctctgcttgctctcttgaccaggctggcttctaactcagagatccacctgcctcggcctatagacccgaaagttgggattgaaggtgcatgtcaccgannnnnnnnnnnnnnnnnnnnnnnnnnnnnnnnnnnnnnnnnnnnnnnnnnnnnnnnnnnnnnnnnnnnnnnnnnnnnnnnnnnnnnnnnnnnnnnnnnnnnnnnnnnnnnccactgtttttgcccagtttacaatctccttgagaacataaattatcttttcccgagagtttagagacagtggggagggcccaactagtgatgacgacggcaatcgcctacacaagcttcttgtcggcctctagagggcaaccaagagcctatcatggtgctctttgtaggctcttccgtgtaggtagaagcgttgtgggtgggtctccggacccaacctccctgctgacaaaggaaatccgagttcctagcatggcgccttcgcgccatttcctgtagccttgaggaaatcctgaaccaatattctggagtcccattaagctagtgaacacctgcgtgatcacccagttctactgagaaaaactcctcttttcaagtcttagaatattgttagaatattagtcacagcaaagtctgtcaatgccccgccccaaatggccagacggaagccgctttctcttgcctatgtgtcgaaaccccattcgctagcacgtcgccggaaaccggtgtcccgtcaccaaagcgctctgcgcatgtttcgtgccggcctgctacacatgcgcagagcgccgctgcatctatgatcctagcgtctgatagagcgtctacactaccctaaggctgagactctatggtacctacgctggaagatgggccgcctatataaagcatgcgcaggcgtgggagcgtctcttttcctccggtgcggtgagtgtgttcggttgcttaatggtgttcagtggtttcgtcgttctttgggattctgggtctatattcttactttgaacgtttcattacagccaccgactatcctattgtcatcatgggtcgccgccctgcccggtggtgagtgctaaatccatactatttctattgtaaaaacggaggaaataattgcatttcttctcaaagacattttttgggagttggactcctcgtcattcagcgacgctgagctaaaaactggccccagatttactttactacttcactgggggctttgtcttttcaagcttgtggattggttaaccaaccaacgactactttgtagcctattttgtagagcaagaaacatgtgcgtatgcactcaaccttctgtcttctcaaatgaaccttgtcataaagactcccatgcctttttagtgacttctgtatctgtctttgttatttctgagtcgtgtgctttgtggtttcaaccggacaccaacggcccgccaagccattttaggcatcacctagctgcatgccctgcagagggcgccatattctcttcacgtggctgaggcgggttttatgtcacatgctctgaagtcttaaggaaaaattgtgctatctcaccctactctgatgaagggttgatactggtgattggtttttgtttaatgtgtcttatgtggcaatctgtttagttgccttagagtcagtttttactaaccgaatgaattcagacttggtcttgtccctttgccactacgtaaagcttgctgtgtttagttgccactcttgttacacctgacttttcttgctcctgcagttaccgatattgtaagaacaagccgtacccaaagtctcgcttctgccgaggtgtccctggtaagtaatgacaaaactgcaaatgtggatctgtggtgctgtctgattcccactccacgggcacttagtaccacgtgtttgtgtttttcagatgctaaaattcgcatctttgatttgggacggaagaaggcaaaggttgatgaattcccactttgtgggcacatggtgtcagatgaatatgagcagctctcttccgaaggtgaggacccttttgttgatcaacatttcttcctgtgtagtctgtatggtagtagccacttcattagtttgagattttctatgtgatttattccactaacatgacctccatctctggacctacctctacactatcctgttttcactgctgtttttctccccactcagctctagaggcggcccgtatttgtgccaacaaatacatggtaaagagttgtggcaaggatggctttcatattcgagtgaggctccaccctttccatgtcatccgaatcaataagatgttgtcctgtgctggagctgacaggtaagctggcagttagcacccttttgcataatttgtgacatataatgtgtgtttttttttcaccagtcaagaccgataggttggaaagattgctcagctctagctaggagcacttgctcttgaggaactgttcaattcttaaatccatgtggtggctcacaaccatctctaactacaattctaggggattccgtgcttctgagagcaccaggcacactagtcgttcacaggcatgcaactaaggccctaaagtagagaagaaaacttttgtgctgttcgtactcttctgattatgacgatcatcatgcatggtttctgttttgtttttccagacggggtttctctgtatttggagaattttgggattttatttgcagctaattaagccgatcaggttcctttccccatgggagcctggtgtgcaatggttgcaaacagcagcctccttggtagtgtatgcagcctatcgcctatatgggctgccctaagggaccttggagacaattttctcagttgctcaagtttctgatctcaatgatatccccaatctaggctccagacgggtatgcgtggtgcctttgggaagccccagggcacagtggccagggttcacattggccaggtcatcatgtccatccgcaccaagctgcagaataaagaacatgtgattgaggctcttcgtagagcaaagttcaagttccctggccgccagaaggtaggtgacattatttattaacttcccttctgttttctttctctgatctcattgacttttttttcttctgtctccctctagatccacatctcaaagaaatggggcttcaccaagtttaatgcagatgaatttgaagacatggttgctgagaaacggctcattcctgatggcggtgggggccaatatatccccaatcgtggtcccctggacaagtggcgagccctgcactcctgagagcttccacagtgctctcctgtaccctaccaaatcatgttcagtaataaatctcatccagtctgcttacatgtttgtatctgatttttagttttgtttttcaaaaccgggtttctgtgtaacagccctggttgtcttggaactcaatttgttgaccaagtgctgggttgtttgttttttttttgttttttgctttttcaagaccgggtttcgctgtgtccttggaggctcctggaactcagagatgtgagtgttaggattaaaggcgggtgccaccactgcttgtgtgtatctgattttgggggggggggttcgagacagggtttctctgtgtagctttggagcctatcctagcacttgctctggagaccaggctggcttagaactcagatccgcctgcctcctgagtgctgggattaaaggtgtgtaccaccaacgcccagccggttgtatctgattattaatatggggttttatggtttggttatacagggcaacttagtgaactgagcctgcaaagagttacaactggtgattttattggaacattttaaacctgacatctctagcagagccatgttcataagtacagagcaaatgtatcagggatatgtggtccagagagaaggctggcccatatagtttaatcattggaataacatgattgtttggagctaaaaattttgaagtaaacctgtggtgacaatgctacaatctaccagagctttttgtaagctggtggtagagggtttttaaagagttcatgtctcccaagtgagcatattttggtgagctcgttttctttttttttctttttggttttttgagaccaggtttctctgtagctttggagcctatcctggcactctggagaacaggctggtcttgaaccacctgcctctgcctcccaagtgctgggattagtttaaaggcatgtgccaccaacacccggccggtgagctcattttctattataaggtatctggaatacatgttctgtctggctctaaatgtgtgttgcagagagccctggagcctgctttgtctctgtgtctaaggtggaatggcttgaagtgacaagttgtatctattccaaatgcaccaaaacccacggtattggatataataggaaataacactggtagccctgtcttcctcttggaataataagcagcagaaagcctacataaaaagaaagggaaggctgtagttgaaaccattcagatcttgcttggcttcaggagatgccagtgttttaagtcattgtccataaggtacaaaaggtgttaagccacctagctcagttgagatggcaaaagtgacagcaggagcagaatggccaaactgaagagttgaatgttgtgagttgcctgactcagctccacctccacaggataatggtcactgatgctgagagccttgggagggacagcaagatgaagtgtcagttcctggggctgaggggctttcctgtcaactcacctccacaattctgccctcagccattgaataagcccttatgttaacccagcttctttacctcttcctcagtcagctgaaagctcctggggaagttgaagggtgctgcagccctcagcagggtctgacagccctgcccatgcatcacaatccgatcgtaggtacagttggtgctggcccgcactgtagtgtcctccccatcagaaatcacccagtggaagcctgcctcagtccgaaggagcaggctgttgagacgctttttagtcagtgatgcacagtcagcattgaagtccccaagcaggatcacatcctaaaggttaaacaagtgattggattttgccacagggcaatcccaccaaaccctctcctgtgcaagctatcatccctacctcattttgccagcgttgggagacatccagaaacacatcatatagggcattcagctccttctctacatccttgggtgtagtgtggagtggaaccagtaccacacttggaaggactgcaaggcccaggaagttgaagctgccatagctgtcagctcttcacatccacttccacttcccctaggaaccaacccacaggaaagccagccaaacctccctctcctgtttgcatgtaccagacccacctttcttcccctcttacttttgctagggagagcgaactgggccacaaaaggttctcgggcaaaaaggtcatttgtgtcattgtactggtaggaattcagaatctgtgtcttgtcagacctataaaaaccaaggggtgggaagcagtggccccaagtattatgtgagaacagcagagctagtgctcaaggaggaacattcctggttcctagttctgccagtttcatgtgggtacaaccttattttctagaacttctggggttttgtttttgtttttgtttttttgtcttttcgagacagggtttctctctagctttggaggctgtcctggaactcactctgtagaccaggctggtctcaaactcacaaagaggattaaaggcgtgtgccatcaatgcccagtttcttttttctttttacttacttttttgacagggtttctctattatgtagccctgggtgtcctggaactctctagactaggctgaccgtgaactcacagagatccacctgtctgcctctgagtgttgggattaaaggcatataccactacttctagcttggagggtttttgttgttgttgttttttaattaccagggataaatgtgtaccctgccactgagtgatgtcttcagctccctagaactatttttgtttttgttaagatttaattttattttatctgtatgagtgttttgcctccatgtatgtctgtggaccatgggtctgcagaggccagaagagggtgtccaattccctggaactggagttaataatgattgtatgctattgtatgtgtactgggattaaaccctagtcctctgagagagcagcaagtgctcttaaaacacggaatcatctctccagctgtacctagaactttcatgagtttttttgagatccattttcattattgcccagctagtcttgaactcatggactccagcaattgttttatctaatttagtctcttgaatagactagtgggtcttcaaaccaccaggaccagctagaattgtctttatgaggatagaatccaacccctgtactcaccggtagatatacacatacttctccttgtatgtgctgcgccctagcagggagctgtttaggaagctgtaagtcctggaactgtcaaatctgccagaaaaagaatccagagtcagggtccttgaggctctgggtagaacccagattagattaacagacccttctttacctattaagttctcgaagcagaagagagacagttttctgggaagaatccaccacctcctgaagcaccatgatatcacatcgagccaggatctgcagggaatgagggataacagctcaattcaaagttatcactatggaggggttaacatatgtaaagactggtgccagggtggccaaagacagcagtgggactaggaggatcccaggaaaacaaagagcatcattctattataccttggccattgcttttagaggatgaggttggttattaaatgatagttgaaggatacttcacatctgtgcactcacatttccagatatccccctcccctttttagtgcatgtccctggtcaggcagagctgagggcttttggtcaaggcacacagatttcttttcttttcttccttttttcttttttctttcctttctttttttttgttttttgagacagtgtttctctgtaactttggaggctgtcctggaactagtgtagatcaggctggtctccaactcacagagatccacctgcctctgcctcccgaatgctgggactaaaggtgtgctccaccaatgcctggcagcacacagatttctgcaacaatgaatttaacttacttgaactaaggtatccatcactggctccttggccaacttgctcaatgtcagtctttgggcattgaaggcacagatacgaaaggcttcagtcccaccagccaggaagatgagcaggagagccacagtaagcccatgcatggccatatatggcatcaggagccctccaaaggaatccgggttgttcagagtgcattggcactgcagctgatctcggctaattggtgttctccctgcttctggccctgaatgtttctggcatcttttcctgggaagtgtaagatacatgtggtttggcataaaactttctacgcatggtagagaaatacttgctattgagcactctctggtcctgagaccctgtctttcaaaaaacaaaaacaaggctaagtgtggtagcatactcttataattccagcatctgggagatgaaggtaagaggatcacaagttttgttgttgtttgtttttatttttcgagacagggtttctctgtggctttggacgctgtcctggcactcactctgtagaccaggctggcctcaaactcagacatccatctgactctgcctcccaagcgctgggattaaagggtgtgccaccaatgcccagctgttttttgtttttgagacagggtttctctgtgtaacagtcttagttgtcctggaactccttttatagaccagtctggcctcaaactcacagaggtccacctgcttctgcctcccaagtgctgggattaaaggcatgagccaccaatgccaggctcactgactggctcttttttaatttttttatgtggggtactggggactgaagatgaggccttacacatgttagggaagtgctctactactgagctatatccctaaccctgcattgttttgtttgcttgtttttttttttttgtggcaagatgaccttgaacttcttctgattctcctccctctacctcacccacacaggaattacaggtgtataccaccaagcttggcttatggagtgcttgggatagaacccagggcctcacatgttggctatgtagggaaggctatactatgtaagctatactatgtaagtctcataactaggcaagcactgtatcatctgaatcacactctagctcagccattttgagtaaagcaagcaccttaatttcctaaagcagaactgctggttcatattatagttttatttttaatttctcttgtgtcatttttgttttgcttttgtttttgagacagggtttctctgtgtagctttggaggctgtcctggaactcgctctggagaccaggctggccttgaactcacagagatcctcctatctttgcctccctcccaagtgctgcaattaaaggcatgtgccaccactgctcagcttatttttaatttttaaggaacaccacaatgttttccatagctgttgtgccattttatattcctactaacagtgcataagggtataagcttattcttttaaccaacttcctcaaaatatcaagaagcagctgggtggtgttgtcgcatgcctgtaatctcaacactcacaaactaaaggcaggcggatagctgagttctaggccagcctggtctacagattgagctctaagcagccggggatacacagagaaaccctgtctcaaaatataaataaataaattgctgtgtaccattttccacatagccccccttcctagctaaggcagagatagtcccagattcagtaaggtccagtttgtcttatacatattagaaaataaaacatgaacctcttcaggtatttctttcttcttcttaacctttttaaaaatttttttttgttaaccattttttttttttttttaagacagggtttcttagtagctatggagccagtcttggaacttgatctgtagactagtctggcctcgaactcacagagatccacctgcctctgcctcccgagtgcttcgattaaagaaaggcatgcaccagcacccagctcctttaaaaaacatttatttgtgtgtgtttgtgtatgcatgtatgcgtgcatgcctctaagtggagtatgttttttttttctttcaccaagtgggttccagctatcaaactgaggccatcaaatttgacagtaaattttcttatcttctgagtcattataccaacccatctgtttctatttgtaactttttatgtgcttttcttttccacctttctttctgttttcatttgattgtttcatatacaggtcttaatttataaccaaggctggcttgtaagtcactatgtagtcccagactgtcctcaaccttactgggtgctcctggagcccatctttgagagtctgtctcagggttttctttgtctcaggctcacctctgcctaaccatatctttgggactcagccctttactgtactccctgtccatgtcacatcccgaagcatgaggccctgcttctgtttgcttgcttttttcagtcaccttgttactttctcctctctgttaatttcctgtctgtcttgttctatcttcctggttctgcccatgtcagcgtttctgttagtgtcatcctggctggccttgatatttgtttctctctggccacctgctctgccactcatgcttattttcgtctctttgcaccagtgcctgttctgggatacaaacgagcattggtgaagctctgcattggccaagttacatctgaagactgagaccactagaactctgggaaagaattgcaaagaatgactttctgtcttcagctcaatccccatcctagtcttccaaagccagccttagttctggatcaaaagtcccttccccctttaagaccctccccaggtagagaacatcctccctttccctagcccgcaggattctcgtaccttggtagaccaacttggtcccacgcctgcctcaaccttgaaccgattgaaacactccacagaatcgcagcgccaaccacggtaaggatttgggatggggtgaagaggaagcccgcttccagacccacccaaagggccagccccagagccaactctcttgtcccaacaagccggactgggctccgccccgtctgggaactggccaccttcctgccctccccgcccaagaagggtggtgcttctgcagagcggacagcaccttggggtcctgaatgtggttggtgccacccgctccgacgagcagtagtctatcatcgagcagtttcctggacttagagaacagggttaggaggtttgctcgctcattctctggccccttctcggcagcaggaagcgaaacaaaaacagtcttctctccaggtcctcaggccctcctaaattatgtttgccgatgtgactgctcagaaaactcaaagcaatggaccttctgcacacgataggcagcacgattggtgagtgagtcctttcaggtcccctctggatgactatggagtggcaacttagaaaaatgtcccatgggcagaaattcgttaattttgctaccacatgaatgctaggaaagtactctattgtgtagatgaccgtcccccttccactccctccccagctcactgggggaaatactacagtacaatcaataaaactgagttttaaaacaataccagaattagtggtggcatatgcctgaaatctcagcacttggaaggcagaggcgggtgtattgatgtgagtttggggccagcctggtctgtatattaagttccagattagcctcccccccccaaaaaaaaagcctcgtgacgcccgcataataccagcacttgagaaacaaaggcaagaggattgctgtgacttcaaggccagcctaggttatacatagagtgtgaggctagtgtaggctatatgagactatactgctttaaatgcaggtggcagataaaagagaatctctggggcttcctggacgccaacctaggcggaaaacgtgaccccaggctcaataatagaccttatttcgaaagtaataaggcacagaatgatgaacacggacactcaaagcctttttcttgactccgcgtgcgccttcagaagcgtgcataatcagactcacacaggatggggcaggggaagagataatatgtaaaagggttccaccagcctaggccttgagttgcttcaggtaatcgtgctgcgcagctcttgtcactagaattaaggaaccaaagagggaggagctaatggcggtctctagcaaagatcctgacggggaagggggcggggcgaggcgnnnnnnnnnnnnnnnnnnnnnnnnnnnnnnnnnnnnnnnnnnnnnnnnnnnnnnnnnnnnnnnnnnnnnnnnnnnnnnnnnnnnnnnnnnnnnnnnnnnnnnnnnnnnnnnnnnnnnnnnnnnnnnnnnnnnnnnnnnnnnnnnnnnnnnnnnnnnnnnnnnnnnnnnnnnnnnnnnnnnnnnnnnnnnnnnnnnnnnnnnnnnnnnnnnnnnnnnnnnnnnnnnnnnnnnnnnnnnnnnnctgaaggagatgcccctccatgtgaagtggccgttccccgcggtgccccggctcacctggaccatagccagtagcgtcgtcatgggtctggtgggcacctacagctgcttctggaccagtgagtggccaaaggccaaggcggagtctgtcagaggctgtcagcctggccagagttggattttggtttgggtactgggggtgtggcagggtctctgctgacactggaagactccccgggcaggtcgagatgagcaagagcttgagactgacttctcttcccagagtacatgaaccaactcaccgtgcacaacaaagaagttctgtatgagctcattgagaaccgaggccctgccacccccctcatcacggtctccaaccaccaatcctgcatggatgaccctcatctctggggtagtgtgctagtgtgcttgggttcagggaggcaaaacaggaataggccccagccaaagacagaatagattcacttctcaccaggctctttggaaaaccatggcattgttcgtgggatacactgcctagctgctggaagttttatgtctcccttaggattcctccagaggatgttatttgcacaggatatcagaaatttagaagtaatgtggaagtggccatgtcacattaagggctttcctttttcctagggatcctgaaactccgtcacatatggaacctgaaattgatgcgttggtgagaagcaataggccccttgaagtggcccatccatttctgcccatatttgccttcctgctctgctcaggagttggcatccaagcagtccaggaagggcatgggtggggccccacaggcccttctcttgagtctcattctgcatgacagtgatgacaggcattgtactgggtggggagagttggggacagggactagaaaggcagggatgactgagtctgttgctgctctaggaccccagcagctgcagacatctgcttcaccaaggagctgcactcccatttcttcagcttgggcaaatgtgtgcctgtgtgtcgaggtgagctgctcctctgggaggcatgtccaggcctcccttgggggtaaggaagctagctggtggtcagtgtctttgtagtagaaggagccatggcatgacagtatgggtggcagagggaagggagaaggattcccacttagattctctgcagtagcctgaggattatccaggactctagcatgagaattcaaggaagctttatttgttgtcccttctctatctactactgctcttgtggaaaggagtgtggtatcatcactctatgatggcagtgcggtatatgtatttaaggccagagggtttgcttctgggagagcaaacagactggtggggtggggaacctgggattgaatgatcactcagtacttttcacaaacccctatgtggagaatggggatcagatagggctcatattttctagatagtagaagtccaaggtcatagactgactgatcttgggcaaatttagaattcagatccacatttccctttcctctggggaagcagatttcttttcaaaggatgaaagaaaaagtctaaaattgggcaaataagccaacgatagagccaggggggtggtgcacacttttaattccagcactcgggaggcagaggcaggtaagtctctgaatttgaggctatcctagtctacagacctagttccaagacagcctgggctacaaagagaaaccctgccttaaaacagccttgtatggtggcctatgcctatagtccctgtatttgggaggtagaagtaggtggtttaccatgagtttgaagccaacttgggctagagatacagaccctatctcaaaaaaaatgtgagcccatgtgtgtacacattgtgtgcccacatacacacatacagagaaatcaagggctggaggtgtggcttgggtacagtttgtagctagctggcaaagaaccctgagtcctatccccagcatcacaaaaagtataaaacaaaaactagaaaatgaaacattaatttcaaggacaacaaagataatctaatcactagttgggaggcaggtgattctttgtgagttcaaggccagcctggtctacagagcaacttccaggaaaggctccaaagctacacagagaaaccctgtcttgaaaaacaaaacaaaacaaatgataatctaattacatgtgagtaaaacatgtgttgtgatactgtttctgtgttaaacaaccatttttctgtaagcctaagactttgtaggttgacctttaagcactgaagtgattttacacaagtagaaatagcatttgcgccgggctttggtggcgcacgcctttaatcccagcactcggaaggcagaggcaggcggatctctgtgagttcaaggccagcctggtctccagagcgagtgccaggataggttccaaagctgcagagaaaccctgtcttgaaaaaacaaaaaaagaaagaaagaaagaaagaaagaaagaaagaaagaaagaaagaaagaaagaaatagtatttgcaaaagttaaaaaccgtgagctgctgttccaaaggcatattatcctttttactttccagtttcaagctcatagggtatatgccagtgggttttggtagaggcgcaaacacctttagtgaccacccttggtatgtactaccatcccaagcaggttccttgtatctctgttccctgaactcattcccacttctggctcctgagtgagctgtcagatcaggtcccttttgaggttgggctgaacccctaatcacatcttgtaaacaacaggcttacagtgagtagtgaaaaggcagttcttagtgtactgacctgagatagccttgatgttgctttgtctcctgtgagataccctccaccccattttataagactaggatatttacccatcccttccctttcctggttctgtccaccctatggttattatttcactattgtggagagtcttactatgtccagatgactcaaggttgctagctagcaaatgatattaggcctctacatctatagtgtggctgaaagctgggctgcttggatgacccaggtttgcactgttgcctttcctcaatccagtgtgatcatcttagaatgtctctaaggttttactagcctcagggcagcttgactcctgttttcagtccccctcccagacctttttgtttgttttgtgagacatggtctcacataacacaggctggccttgaaatactgattggtccatccaagtttccctgtctcttctgtgttttctgtttactgaagtgttctcccttggcccagaaaggtcaagaaaggttgaagcaatgtcatccaaagagtagagaggcccaggagctgatctggagccagcaaatgggtgtgctttgggaggggtaggttccagcagaacaggccataggggcagagggagatggaggagttaccatgttatcatttcaataagtgatactgtctagccaggtgtcttgttgcatacccgtaataccagcaccgggaaagctgaggatcagcataactttgaggccagcctgggttacgtagtaatatctgtctcaaaaaagaaagaaggtgctatttatacatgacatatactaagaggttgagaggacattgttttctttggttttgatataggatattactctgtggtccatcctgacctcaaactcaacagcggctcttttgcctcagcctcccaagtgctgagattataggcgtgagccaccatgcctatcttgagaggaggatatggttaaacaaaaaatgtgaagggtcagggtagcaaggagtaacaggctctggaaatagtcgttgaaggtatctatggatgatgatatgggggatgaactgttgcctccatcataatgaggatggatctggagtgggcctcaatgtgtgaatctaattcactgaggtttggagagcttggtatctatcccagagaatggatcaaagagaacagacctttctctgcaggagatggtgtctaccagaaagggatggacttcattttggagaaacttaaccatggggactgggtacacatctttccagaaggtcagttgggtgcttggtcggttgggtgcttggtcagggtcctctagcatgcgtggtttcagtttccaagccttgtctctgtgttctctcactagggaaagtaaacatgagttctgagttcctgcgcttcaagtggggtaagtgttgctggccaagctgacatagccaagttccccattcaaaggtggccctgtgggtccctggctttattcccctctggtgggtgtgtcaggaaaagtgggaaggggacagctaggagtcaaggactattctttaattgagagacagtagaagtggacactggccagattagcagggaagcttggcccaaaatgtttctgcctctctcctaagtaggaattgggcggctgattgctgagtgtcatctacctcccctcaccctgccactatggcatgttggtgagtcaggggctgggggtatggaggggatttccttagatgtttttaaggggattgtgggttgttggatggctgagagaagtgcctgcctggggctctctctggtaccctggtacactgcttcccccaatggctggctttctatccactgtgctacaggaatgaatgatgtcctccctaatagcccaccctattttccccgatttggacaggtgggtaggcactgctgacccttgtctatctgtctacttgcctgctatctgccctatgtctcctagcttgtaatataaaggattggttgaggatttgctgagcatgagcatgtagtgagggtggggtagagttggtggggcttttctggaagcaaggcctttagaataagaattgaaaattgggtggaagtgcgggacaaggtggagcaagacagtcattgataggatggataccaggataaggctgttccttggataccaccaggccccactgcctgttttgaagagggggagtggctttcaggagcaccaagcccattgggcagggcatggctctgactccccacattgtttgggctggaaatataggctccttgtcatccttgatggcctgcctccttacagaaaatcaccgtgctgattgggaagcctttcagtgcactccctgtgcttgagcggctccgggcagaaaacaagtcagctgtgagtttccaactaaggtcccctagctgtccttgaccttcccagcccctcagattcccagggtacctcagtcatagtcactgaggagtgcaggccagcaccatccttgctctcaggtggagattcggaaagccctcacagacttcattcaagaggaattccagcggctgaagatgcaggcggaacagctccacaaccatttccagcctggaagataggctttgcctacccagtctgtgccccaaagtccttagccaagggagcattgggccctccagggtttggaaagtggtggtacaggaccctgcccaagcttgcttggctctgtactgcctttgagtttcttccctgcacaaaactgaggctgggagatggaccaatgcttttaattcagatagattggctcataatccctgcttttctttcttcgttttgttttgagacagggtttctctgtgtagccctggctgtcctggaactctctttgtagggcaggttatcctcaaactcatagagatccacctgcctctgccttcagagagttggaattaaaggtgtatgctaccactacctggcctgaataccctttcttatccttgagcatctgactcctctggatctcttgggctaaaagaaaagccttggatgtccctcacacttggcagagaagggaggaagacttttaggcaggggctggcattggaagggagcaaagcaggcagttgagtgcctagtaggagaataggtgtcatggccattgatgcagaaagagtacccaaatggccccttggatgggctaccacctgcctacctttgcccaggagctgctcacagcctcctcagggatggctgtcaggcaggtcattcttccacctgagcttctcccactgtaagatttgtgcttgggtggccccagacaagagcaagtcttggccaggattcaagcccagctaaacttaactagatgtttctgttagctggcagaaaaagggcccctaagacctgaccatgaacacccccccatatcagggcctacccacttctctaacctttttgctttgacatcccctatgtactgatttcatgtttttagagtaataaaatatctgtgttataccactattcctctgtcttctgtgtaggaatgctgagtactgagaagtactttgctggacaagtaaataggacccttgagtctgtatatagtgagatcatttaaatagattgacattggtatctcactgtacactggccactcaagacatccattatcacctgtaagccccatgacaatgtggcaggagtagagattcataatagtggcaaaacaagattaataaagtagcatgaaaacctcaagtgaagtcagacatggtagtacacatctgtgatttgagcattagggaggctgaagcgggaaatgttgccacatgttcaaggttggcctgtgatactaaatgagagattaaaaagaaaaaaattaagtcaaccatgggaggcagaagcaggcacccttgtaatcccagtacctgggagaaagaggacaacagatctctgagtctgagaccagcctgggccacaaaacaaacagtttcaaacaaatagtaaggcaggcatggtgacaaataccaataatgcttgcattttggaggtggagtcagtaagagtaggaattcagataatccttggctatgtagcaaattcagagcctttctgggctatctgaaaccctctcccaaaaaattaaaaaatgaatataaccttcagccaggcatggtggcacaagcctttaatcacagaactctggaagcagaggcaggatcagaaaaattcaaagttggatgttggtggctcacacctttgatcctagcacttgggagacaaaggcaggtggatctctgagttcaaggccagcctggtctacagagctaattctaggacagccaggactattacacagagaaaccgtgtctcaacaaacaaaccaccaccaacaaaaaacaacccccctctcccccaaaaaaaagaaaaaagaaagggctgaagatgtggctcaatgagcacttacttagaatgtgtgatgccctgaagcctgggtttaattccaacccttaaaaaatcaaaaaataaaagaaaaatgttgactaaagagaggaatacccccaccccaggaatgtgtccgtccttgtgtatatgctggtacaaatgtgtctgaactcattatgtagccaaggatgacttgtaacttctgcctctaccttccaagtgctgctgattacatagctgtgtcaccatgcctggaaaggtttataactcttatttttattttatttatttgtatttattgttttttttctgagacagggtttctctgtgtagtcctggctgttctggaattcactctgtagaccaggctgatctcagactgatctctgcctcccaggtactaggattacaagtgtgcgccaccacctcctggctactctcagtttttaattttgagtcaaggtctcacttagctcaggctggccttgaactccttatgtaatcaaagctggctttgaatcccttatcctcttgcctccaagtgctggggtcacaggcagttaccaacatgtccagatgagtttattactttttggttttttgagacagggtttctctgtattgttttggaggctgtcctggaactctgtagacctggctggcctcgaacttgcagagatccacctgcctccgcctcccgagtactgggattaaaggcgtgtgccaccaacgcccagccccaacaaacactcaaacattcttatgttatttttttactataagatgtgccaaataaataatgtattagttccctagggtgctgtagcaaagtgtcacaaactagctagcttaaaacaaaacagttctgttcttgtttttaaagatttatttatttaaaaaatgtatttatttattgtttatacagtgttctgcctgcgtgtatgcctgcaggccagaagagggcaccacatctcattacagatggttgtgagccaccatgtagttgctgggaattgaactcaagccagtgcttgtaaccgttgagccatctctccaacccaaaacatagttcttttctgataattttgtagactacaagtcgcaaatcagggtgttggtggagctgagtttgctctgaaggctctaggagagagttggttcttgcttctctcttctcaattcctgatgagggaaatctttatatatccttggcttgtagctgcattatggcagtctgtctgttcatctgtccttctgccctgtctgcatctatgttttcctcttttgcctagcataatggcatgtgacatttagaggagttgaaagcaggaggaccaggaattccagcactgcctacatagtgagtttgaggccaccttgggccatgtgagtccatcacaaacaataaattccttccttcctttcttcctcccttccttctttcttttttgttggttttttaaagacagggtatctctgtgtagctgtgaatccctggctggcctgggattcgctttgtggaacgagatggccctgaaatcttagagatctgcctgcctctgcctcccaagtgatgggatttaaaggcatccaccgacaccactcagcaaatttccctcttatcatattataatgacagcaatcatcagactgtggcccatccttccatattccgagtttagcagtcaatatgagtttattataaatggattacatatgcaaagtccttgtttccaaactaagatgcatttacaatctcttgggggttgcaacccacagggtgagaaccgctgtcctagattaattacgtctggagagttcaagatttggttgtactcttcctttttcttttttctttttgtttgcagtactgtgggaatgaatttagcatttataaagtaatcaacagactaggaaataaaaatggcacggaaatgtgggcatgtttggtggctcacaattttttttggctcacagttgtaatcctagtacttgaaaggttgaggtttgcatagtgaattttgttcataccacaactctgtctcaaaaaaaatcaatttatttatgccagtgacttccattttctgtcagtccttcctttaaggcaaatcactcagaaggaaggataatcctcccacggggagtctcccctaatttacagtgggatcttccttggcaaagttggaaagtgttgctaagtaaaaaaaaaaaaaaaaaaaacagtgttctgctctcatggtatttattacctgccttttagtggcgaatgacactgacattgttagttaatgttctccttcagacccggttaccgcctgggttttcccctcctttctgaaactgcatttgttctctttttctagatccttttcccttctacccattttaagctctgactattgttcccctgatggtacaatggaccctcttctcattctaagggattgcagttttcatatgtaccagacagagggtctatttttagaaaaaagatccagtcatgcgactttaagacgaaaacagaaaaagacaaatactagagaacagggctctgtctccccaccccgcctagctgagctaggtagcagctggtagtgctcggccccccgcctcctttctcacaaggagcgtgcgcgactggagacacgtatagccaaccagtgagaaagagtggtcatgagtgccaggattttgacccaattagaggannnnnnnnnnnnnnnnnnnnnnnnnnnnnnnnnnnnnnnnnnnnnnnnnnnnnnnnnnnnnnnnnnnnnnnnnnnnnnnnnnnnnnnnnnnnnnnnnnnnnnnnnnnnnnnnnnnnnnnnnnnnnnnnnnnnnnnnnnnnnnnnnnnnnnnnnnnnnnnnnnnnnnnnnnnnnnnnnnnnnnnnnnnnnnnnnnnnnnnnnnnnnnnnnnnnnnnnnnnnnnnnnnnnnnnnnnnnnnnnnnnnnnnnnnnnnnnggggtcgggctgggccgggtcgagttgagttgggccaagtggggtttaggagggctgtgctgtgcgccgcggtggatgagtcacctatgctgaactccagggctgtccttggccgggtttcgaggcccagatggaaactgtctcttactcaggggcctacatgaagccgggagctcatgggcttaggatctcaacccacacaatcacatctgacgtgtctcttccgtccacttctagggacctgtgggctcctatggtcgacacacatgagggtcatattaccagcaatatgcagctttctacctacttagaccctgccctggagctgggcccccgcaatgtactgctgttccttcaggacaaggtgagtctactccagtctgctatgtctttttgttggtaatcacaccccacctcaccctcactgccatttcccaggtgaagctgtagtgaccttgtcccacctgtaggcaggtgtggctagattttcttgaagacctgtaagagatgcttcagtgggaacaggatacccatgggaatggcagggacttgatttaagggagcaaggggtcaaacattagatacttaactagtactaagcattattttctggtgttctgtagcatggtggggattatcactcagtttcacagatgagaagattcactttgggggaagatcaatgtgacttgcccaatagctaatggttggcagaactgtaattttaaatatcacaattgtaatatttttttttggtttaactgctaaaggaagtaatattgatgaggtaaaattaattgctgaaggcccagatttggagacagtacaacacactgcttctagttctgggggtatcagtcctgtcccccagttttgtgctgggccagcattctattttcctttcattccaggtgtgtgcacccagagcaggattatggactatgagaaggttctagctcagcataagatcattgttcaggaggatgtcaagtctctacttgtcccttcctctttagtggcctagttggctcattttgtttgtggcctccctctgttgctgtgtctgctggtggtggtgattatgttggtcaatagtctttttgaaaggtggtaaataataaagtcagactgttaactcagtcctaccacctgtttcagccttggagaacatgaaataatctttgtaaaccacagtttttacacatgtgaaatgaaaatatctacctatagcaggggactgagagaagtaatctacataaatcctctagccacagtctcccaatattagggtatttccttcttttgccaatgatagagtgcttagtatgtgttaggaagtagacagtcttgtgaagacaagtggttaagagctaaatttgaagccaggtgcatacctgtaatcccagaacttggaggcagaggcaggtggatctcagtgagtttgaggccagccaggtctataaagcaagttctaggacagcctgaactgttacactgagaaaccctgtctcaaaacaccaaaaaaaaagggaaaaaaatagctaaatttgagccctgtgctagtgtcgcatgcctttaatccatcccagcactcaggagatagaggcaggcggatctcagtgagttcaaatcctggtctacagagcaagttccaggacagctggtactgttacacagagaaaccctgtctctaaaaactaaaaaaaaaggggggctggagagatggctcagaggttaagagcactgactagtcttcaggaggtcctgagttcaattcaaagcaaccacatggtggctcacaaccatctataatgaggtttggtgtcttcttctggcctgcagcatacatgcagacagaacactatgcgtaataaataaataaatctttaaaaaaactttaaaaaagagctaagttggtacatgatatactgtcagtcctttagagaaggaagcaggttaaggcaacacaataacaaaggatactgctttagataacagtgtgatcaggcagggtctcatcttgttagtagtagggagtcatgtgacttttgaggagggacattactgtcaggaaaacaagaggtgtaaaggccctgggcaagggagtgctcttagtaagttcaagggagtgcttatgtgatttggaccctagagagtgattgaaaaggaacgagatgatctgccaggtcacctagagatggagcacaagggcaaaggttggtggtagttctgagtataacaaagccttgtatatgtagtgccgagtataggagagtatactaggaggggaggctagaaaagaaggatgggcttatgtatagtaaacacaatgagtttagggaagctggttaagattccttctgggcctaactgggaaaagccagaggaagctagctgggaatgaagggaggaggggtaagatacttgtagattgtagagggaagggcatgaaattggagttaatgggagtcctgggagctcagaagttccagtttcctccattgtgttccaatattttcctctttcctaactcccaccaaaaatggttggataaggacttcttcccttgaaaaaaggatcctgtccacactggacatagaggttctctttgctctgacttctacttcccacttaggaggcatgtaataaatgttctttgctgtcctcttcctctttccagcttccctctttcctccctacttcttgctgtgtggctcttgctttgtaggttatcataagctaggtttccatagatttcccaaccctatgaccacgttcagtgtcttgtcaccctgccctcagagtgctggggaggaaagaatgagccttccactcacctccaccacaagtgctggtggttcactctcctcctccatgtcaaatatgacttataatatatttggccctgggaatccccccactgcccttagtccttgttccttgcccagccttctggtgacatctcttctacttctcttttagttaagcattgaggatttcacagcatatggtggtgtgtttggaaataagcaggacagtgccttttctaacctggaggtaagggtctgctcacagccccagctaagaggacagaaatatactctgtgctctttttcccagagagtaccagaggcttttgagggtagatggcctgggatgtgagtgtcaaatgtgggacataactttctgacccattgtgacatccctaaggggtatggcttttcaggcaagtttttttgtacttattaggttcattgttccctggattattttacctttcaccttttccctgccatcagaatgccctggatttggctccctcctcactggtgcttcctgctgtggactggtatgcaatcagcactctgactacctatctgcaggagaagcttggggctagtcccctgcatgtggatctagctactctaaaggagctgaaactcaatgccagcctccctgccctgctgctcatccatctgccctacacagccaggtacagcctgggtggcatagcctctagccttgcacttcaagagatgggtaaggtcctgggctctgagctttggtggcagagttgagccaaagatgacaatattctcctgtttactacattgagactcttccagaaagttccttgtatgcccagaagagacaggaaggacttcctcttaggctgtgacttacaagtatccactactgagttattcctattgggcttccagaaatgaggcagacatggtccctacttgtagaaaacttcttcacccaatgaggccctctttataaaactggacagggactgtacctgcaaactggtgaaagggaaatggaattccaggtagggatactgaagcaaatagaggtatggggtggaggagggctaattgctgctgagctgggcctctgcatggctgtcagggcagcagctgaagtgcacaggcttggtgagtgcagctagtggggaaggagatgctagaggggttgagagaactgctccaggcaagctgtttggatttgagggaaaaagcaacctgagggcctcttattttcttatccttagctccggtctgatggcaccaagggaggtcctcacaggcaatggtgagtgtggtcccaggaaaatagaactggtttctcctcactacaagggtggccccctgtttctcagagtagctgacagctgagcagggacatagtggctgcctgcctggccatgttcttctgtagctagcttcacctgatagaggtgccttatgacccttgtgcaagagccctgtaatctagcttctgcacaggtctaacaaatctatggatttaatagaccagtaacattatgcaaagcaattaggaggacttgtctttgtagtaggacttgtctttgtagtaaaggacagtctatctgcatggaaaagaatttgggtagatctagagttctctgtatcactatatgtttcacttaggttgggcttggcattggagagtccatgattgaggccacaattgtccccagagagactggtagagggggtagaaggagaaatagctggttttaggggtcttcagtggaaacaaatagcaccgaatttctcaaggtctagaaggtctctaaagcagacagtggggagtatttatttaagcagactacctggtgacttggctctctgctctcctgtcacgcttcagatgaggtcattggacaggtactgagcacactgaagtctgaagatgtcccttacaccgcagctcttactgcagtccgcccttctagagtacgtactcttctagcaggggccctggggcatggggttatgaggtcattggtgagtgtgcctggagatgaaagggtatgtcataggcagggcctcccaggagtccttatcttgggagattagtgggcaaaggattgctttctcaattcatggggactttttttcccatcttgggcagtgttcatgtgtacttgctgcaagtgttcataagtttagggagatggaacatcagggctagggactttcagctcacagggcacccagtgggaagggagactgttacaatggattaggctttgtttttagggctgttgagagaaggcttgttggatatttctgcaggtggtccgtgatgtacccatggtggctgagggtctaggtcgacagctgcttcagactcaggtggcatcacatgtgatccatcctcctgtgagttacaatgacactgccccaaggatcctgttctgggcacaaaacttctctgtggcatacaaagacgagtggaaagacttgacttccctcacctttggtgtggagaaacttaacttgactggctccttctggaacgactcctttgccatgtaaggacactaggcagggaaggaaggactgtgttatcacatatggccttcttgccactgtgagcccagtacagggcaagaatgtagatcaggtgtgtctatgttgggggtgaagaaggtctgttcaccaaggacttgaagatagtatcacggggtaatgttactgggaggttactggagaggaagcctcacaagttttacctttccatgctttttaggccttggttgttgggttctgggttattaccctcacacagtcccttggaaccctagcgcttctttgaactcaacccctgggactacatgtgagcaaatagcagaccagccgccaaaaccagttctaggcttcctatacctgaaacctcagcaggcagctgaataaccttaagaaggggatgaaagaggctcaggggactcaggagaaccagaggaaggaatcctaagctggagatctgggacctaggtgcagatcccccaactgttcctgatttgcttatgactggagccttagttttcccatcagataaatggggacactgtagtggaatgtcactgtaaggatggatttaggacagcttagattggacccagcctgaggagaaccatactctaggtccttctagagcctgacagcacccctctgccttgtcccacaggctttcactgacctatgaaccactctttggtgcaatggtgacattcaagtaagttctggtggttgaagtgtggcttggctggtatgtctccattgtcttctgttcatctgacaatctctgctaccctcacctcccaggttcattctggctagtcgcttctacccagtgtctgcccgatactggtttactatggaacgacttgaaatccacagcaatggctctgtttcccatttcaatgtttcccaagtcacgggacccagcatctattctttccactgtgagtatgtcagcagtctgagcaagaaaggcaatctccttgtgaccaacgtgccctcactctggcagatgactcttcaggacttccaggtattaaagggggaatgggctccaagctggtggcagtagggggagggaagaagagcccagagaatttcagtatggcttgagcatgtagctgagagttccatccttatgctgtctctgaaggtctagactgttcactgattccagaaccccagcccttgttgtctgtagaaacttgtggtcccttctgatccatgtctatgtgtctcctagatccaggccttcaatgtgacgggtgagcagttctcctatgctagcgactgtgctggcttcttctctccaggcatctggatggggctgctcaccaccctcttcatgcttttcatcttcacctatggcctgcacatgatactcagcctcaagaccatggatcgttttgacgaccacaagggccccaccatcactttgacacagattgtgtgacctgtgccagagagagattgagggagtgttggtgtctaggttgtcatgtttgcatcttgtggcatagtggatagaaagttttttttctcttcgatagcatgaaccctgcagtaccctcagcctgtcttgcttcctcttcaacctactgagggactggcttccctggggctatcccccatctctaccaacaaagtgtatatattcttcatagatattagacaaatcttccaggctccatcatcatgaggggaaggaacattaattctagggttccctttctccctttcccccttatttattcttgcccctccgctacttgctgtttatagtgcttctgtgtaattaatgctcactccccaagctttatgaatcttccagcaacagcaataaacttgaggttccttgagtttgagatgtatggaaagactacttaactgtctgtccagcttggctgttgtgttttttgggtgacatgttaagaatgatctgtacactggggtttatttctgtagcctgagaaagaagagacctccacaaggcttattcccactaggattgtctgccaagagatggggatgggggtactctttttgtttcccttcctaataaaataaagacgtgttgtcatatgtgttgggcttcggctttgagtcactcatttctgcacttgacagtagatttgtttttgactgaggggaagaagtgcccaggtgtagtcctaacaggtgagaggggaagggtgggagagtcttcatcaagctgattgatactcttaacgagttaaggtagaggcccattatttctcctggccttggggagagtccttacaatgaaagatacaggcaactgcaaataccacagggccttgctgtttctcccagaggggcggtatgggatcgcgccaggagggatgggacggggcggggcgctcnnnnnnnnnnnnnnnnnnnnnnnnnnnnnnnnnnnnnnnnnnnnnnnnnnnnnnnnnnnnnnnnnnnnnnnnnnnnnnnnnnnnnnnnnnnnnnnnnnnnnnnnnnnnnnnnnnnnnnnnnnnnnnnnnnnnnnnnnnnnnnnnnnnnnnnnnnnnnnnnnnnnnnnnnnnnnnnnnnnnnnnnnnnnnnnnnnnnnnnnnnnnnnnnnnnnnnnnnnnnnnnnnnnnnnnnnnnnnnnnnnnnnnnnnnnnnnnnnnnnnnnnnnnnnnnnnnnnnnnnnnnnnnnnnnnnnnnnnnnnnnnnnnnnnnnnnnnnnnnnnnnnnnnnnnnnnnnnnnnnnnnnnnnnnnnnnnnnnnnnnnnnnnnnnnnnnnnnnnnnnnnnnnnnnnnnnnnnnnnnnnnnnnnnnnnnnnnnnnnnnnnnnnnnnnnnnnnnnnnnnnnnnnnnnnnnnnnnnnnnnnnnnnnnnnnnnnnnnnnnnnnnnnnnnnnnnnnnnnnnnnnnnnnnnnnnnnnnnnnnnnnnnnnnnnnnnnnnnnnnnnnnnnnnnnnnnnnnnnnnnnnnnnnnnnnnnnnnnnnnnnnnnnnnnnnnnnnnnnnnnnnnnnnnnnnnnnnnnnnnnnnnnnnnnnnnnnnnnnnnnnnnnnnnnnnnnnnnnnnnnnnnnnnnnnnnnnnnnnnnnnnnnnnnnnaattcagggaatgttccagaagcagcagtagtgggggtagttacgacattccctctaccccagtctggtttcccatggagatctcaggctgaatatatcctctgcctttgtccttgggctagtgacagtgattggttgttggtttgcaccctgagtctggaccggtagatagggctggagggtcaggggctcctgcctttgtaggaggagcagcccagggtggggtctgggatttcatttgaattggttcttctccagactcgttacctttttgtgggctcagagcaggcagatacttacttggcttgtgggtactagaagactgtccttgggtctgctggaagctctgcctccctaagcctcatttaatgctctggcattccacattcttgcccaacagggttataaaggaaacatcgaatgaagccatttcccctctctccagttttaggtgctacaagaggcagggatttatgttacaaaatttatgtcgggtttgagtcagggacaaaccagggatgcaggtcagaaggcagatgggagtgtagctgcaaatgccacccctcccccaggaatgcatcttgtctggcatcatgtctgtgaatggaaagaaggtgctgcacatggaccggaacccttactatgggggtgagagctcttccatcacacccctggaagaggtaaggcttcttggacttgagctaagacccagacccctttttagtctctcacataggggcatgggggcaaagtagttcccaggtgctgggctggagaatgggagagggataggtggtccttgacatttttctttctttctgtcctgtttacagctatataaacgttttcagttgctggaagggccccctgagtcaatgggccggggccgagactggaatgttgacttgatccccaaatttctcatggccaatggtgagggagattaagaagataatgtatatggtgattggtgggtggtggtgattgggaagaccagaggggaggttcaagctccagaataaggtcagtcagacaactgagagatttttgaagggagctacactgacatccctaatcctctctggacacaggtcagctggtaaagatgctgctgtatacagaagtgactcgttatctggacttcaaggtggttgagggcagctttgtatacaagggaggcaagatctacaaagtaccatccactgagactgaggccttggcttctagtaagtatgagtctccttagccagagaataatgggacaggaggaagcagactattctcaagatagttaggcaaaaggctcccatttgcctaagcctaatcttagctctatgtaataccagaggccccttgctttatagtacctttattggaatgtgctacccatcctggcaagttaccagaaaggaagctcattgaggaggatttctttttggcagagggcctacttgacccccattgcatccccaagtggagctaggagtgcctcttcctacaaataggaaaactaaggccaagaagggtggggcagggttacatgactgagctctggtgggagccaggacaccaactttcctggcctgctctggtggaaagaagagttttatgtcccagtaatacaaaaagagtcttttcaatacccttccttcagatctgatgggcatgtttgaaaaacgacgcttccggaaattcttggtgtttgtggcaaactttgatgagaatgaccccaaaacctttgagggtgtcgacccccagaccaccagcatgcgtgatgtctacaggaagtttgatctgggccaagatgtcattgatttcactggccatgccttggcgctctaccgcactgatgagtgaggggaaagctggctggtggcaggagcccctttgtctgcctcccactttatcctccccacccctgcctattgtatccactgcccaccctgcatatctcttgtacttgtctataagttcacctgttgcatttccatccctctcttccatttgactcatatctttgccaggtcacaaagggtggtgggaaggcggatggtgtctttgaaggtgagcaggagtgctgctgtcaaagcatcttctcttgttccccagctacctggatcagccctgtcttgagactattaaccgtatcaagttgtacagtgaggtcctggccaggtctggcaagagcccatatttgtacccactctatggcctgggcgagctgccccagggctttgcaaggtgaggacctttttttcccaagctggcattagtgggtatgactaagaccaataagcctggtggtggtggcacaagcctttaatcccagcatttgggaagcagatgcaggcagagctctgtgagttccaggccaagctggtctagagagtgagttctaggacagccaaagctacatagagaaacactcttgaaaaaccaaaaataaaatgaaataaataaaagaatggaaattacctcctatggattttttttttttttcttgagacagggtttctctgtatttttttagagcctgtcctggaacttgctctatagatcaggctggccttgaactcagagatcccatctaaatcttcatgtacattgttccatccctggttaatgggggcacagccttagtacagagtaaaggtggagagttggctcagcagataaaagcacttgtttttacagaggacccaggtttaattccaacagccacatggtggcctacaactgtccataactccagttttagggaatcctaacaccttcatctgacctccataggttccaagcatgcatgtggtctacagacatatgccaagaaaacacatacacgtaaaatagtcaatgtaaataatatacttaaaaagtaaaggaaatacaaagtaaaggaccagatgaccatgaaaatagctttcccagttcctggtagtacctgaactaagtctaggaccccagaaccttgaatctaagattccctggaatctggctctttgccagagagtcctttattcgattcctgagccatttctatgtgaagctacactcattggactttgcagaatagaatgttctggatggaaactccagagaggaaggtgtatgccaagatgggccctcagttcattcataggagggacacctgaaacagttggagtcaaattctgtctacctgggcagttttctccatctcataggtagggtggggagagtacagtagatttggtccccattgtcctaagacttccccatcattttccttactatagattgagtgccatatatgggggaacatatatgctgaacaaacctgtggatgaaatcatcatggagaatggcaaggtggtgggtgtgaaatctgagggagaggtaagcatatcctgtgcatttgttaccatggcttgggtaaggtttggtcttttttagggatatattcatagggagccttaattgctggtgaatttgctgttgctgaaccctgagagcctcatagctaggaactgggtggtcaataaaagtccacatagctattcctgttggcaagaagtatccttcacgacctggagagatggctcagaggttaagagcactggctattcttccagaggtcccaagttcaattcccagcaccacatgatggctcacaactatctgtaatgagatctggtcccctcttctggcctgtcggcatacatgcaggcggaatgctgtatacatagtaaataaataaatcttaaaaagaagtatcaaattgccaggtgtggtggtacattcttgtaatcccactactgggggtgggggcagaggcacatggatttaaatcaatcaagaagtaaccttcagaagtcacatgctgtgtctatagtcccaaaagcattttttgtttgtttttttgagacagggtttctctgtggctttcgaggctgtcctggaactagctcttgtagatcagactgccctggactcacatagatccgcctgcctctgcctcccgagtgctgggattaaaggcatgcgccaccaacgcccagcctaaatgcattcttttggaaagggtgtcatgtatcccaggctggcctcaaatagtctatataggtaaaaatgaacacttaatccttgtgcttccttccaccttcctcatgctgggattacaggtgtgtgtcaacatacttggtttatgcagtgctagaaatctaatccagggttttatgcatgataggcaagcattatactgagacacatgctttaccaccccccactcccggccaaaaaaaaaaaaaatccttcagcctggtgtggtggggcatgagcactgaggtggctgagggaggaagatcctgagtttgagattagtttgggccaaatagactcaaacaaaaaccccataaacagcaaaaaaaaagtgtgatcattgtgtttcagcagtagggttacctagtcctgtatgtgagggatcacttctgagcttcaaggaagggattgtgttctataggagggatggtgatgacactcagagctgcctggctttacattaggctcagcttactattacccagggcaagtggtgatctgacaggtacaaagcctctggtgccttcacaggtggcccgctgtaagcagctgatctgtgaccctagctacatcccagaccgtgtacggaaggctggccaggttattcgtatcatctgtatcctcagccaccccatcaagaacaccaatgatgccaattcttgccaaattatcatccctcagaaccaggtcaacaggaagtcaggtaggtcagtccatgagggattaccttctgttgctatgtctctctcacaagaagtcttggggctccttgtgacattttgttatggaatatgtctgggattggatgggccttttcttcttcatgagattgacagtttggatgctgtctgcatgtagggctggggaggggcaggtgggccagattcatgtccacttcgtaggaactacctttttgtgttgtcatttcccttggcacatgttaactgagtgcttcctgtggtcagacatctatgtgtgcatgatctcctatgcacacaacgtggcagcacagggcaaatacatcgccattgccagcaccaccgtggagactgcagaaccggaaaaggaggttgagcctgcattggagctgttggaacccattgaccagaagtgaggggctgagccaaactgggcagactgggttgaaaaccaggaatgggcaacacccattgtgagactttaatgtactgttttccatttgcccctcaggtttgtggctatcagtgatttgtatgagcctattgatgatggttctgagagtcaggtaagaaacctgtcccagtcagtgctggctgttgatgcccacccaagatcctctgcgtgatttccctgagccctggggttttgcctatttacaggtgttttgttcgtgctcctatgatgccaccacacactttgagactacttgcaatgacatcaaagatatctacaaacgcatggctgggtctgcctttgattttgagaacatgaagcgcaaacagaatgatgtctttggagaggctgatcagtgattgctgactcccctcctccagcccctgctcccctttccccaacctgtatgtcctttggggcagggaagatggtatggctgggtatccctgtttccagcatcttctgtttcccccaccacattctgatcacttaccttgttgatttgattcactgaccaaatccttaaccttagtgatggtttgggagatgggggttgggtagtatcctctttcttggttctaggaaaagaggattcctgtgtgtgagcacatgtgctcacgagtgtgtgagtgtgtgtgtgtgtgtgtgtgtgtgtgtgtgtgtgtgtgtgtgtgtgtatacacgtgtacaccctaattctgctgtttgggaaggagtggaggaaaagctgactctgcccccactgttcttactcctaatgtagtggcctttggagataccccatctccacccccaactcttatgtgttggagagaaggggccctcccagcacaaaattgcattcctcttcccccttataatttattctaatttattaactttgacctatctgtctgagccttcagcctttctgtgcagcctggggctgtagagttagctgccctggcctttcccatccctggcaaagtctgggttgggtgaaggtttatgtgtggccccctttgggagttgatctatttttaatttcttgtctttgtgttgtgttctttgagaaaacgtaaatgtgagcaaagcagaaggaggtgggaaagtggatccaaaccccagtgtgccctgcccaatgccttttcctttagtggttggaaacccttatcttgcaaagtgaatgtgtccccttccccaacctctagtgtatttcaaaataaaacccctccaataaaactgttgaaacctgagtctggatctttaggttctttgctaaaatcaaaggttgttgagttgttttgcagtattggagcaatttagcttctggaattagaactatatcctcaagagtcaaggcaggtgaggtaggtccatcatcagctggtgttgagtggggtcatttttgcactcgtggtttctttctcttttttttgagacagggtttctctgtggctttagaggctatcctggcactcactcgggagaccaggctggtctcaaactcacatagatccacctgcctctgcctcctgagtgctgagattaaaggcgtgtgccaccaacacccagcttgcactagtggtttctaatttcttttattatgtatacaacattctgcttccatgtatatctgcacaccagaagagggcaccggatttcataacggatggttgtgagccaccatgtggttgctgggaattgaactcaggacttctggaacagcagtctgtgctcttaacctctgagccatctctccagcatgccctagtggtttctaagtcagagaaaaggcatctaggtttggagactgggttcaaggccattctgggtgctcagaggcagggcagcacaggtgagatggctcaattagtaaaggcactttccaggcaaccttgaattagatttttggatcccatgtaaaggcaactccacaatatgacgtctgcacattattccatggcttttgcacacacaaacatatacatacatttaatatttcatgtgtatgggtattttgcctagaccaatgtgcgttacttgcatgtctgctgcctgcaaaggtcagtagagggcgttgtgagatgctatgtaggtgctgggaattgaacatgggtcctctggaagtacaactacacatcataaccactgaactaactctccagctcctcaagaggagtgtggatcaggagctagtctcagtcctggggaagcaaagggacccatacctagcattggatgatagcaaaaaatccaagcagccaaccgagaggtggtggctcacgcctttaatgccagcactcgggaggtaggagcaggtcgctgagagttcgatgccatcctagtctacagactgagttccacgacagccaaggttacacagagaaaccctttctcggaaaaaaagcaaaacaaaacaaaaaacaagcagccatatagtgtcagtctgtgaccaagtagaagggcaacacctgtctaggagatttcccgggagcgcagcactcagtggccgctcctggggccaataggaggaagtaagaggactggtgatctagcttaagacagcagttaactttgagggtgtgcaggaagctagcgggtataactctgtcacaaaagtggcagcagaaagaacttgtggtttctcaaaactaggatcccagcagtctgtggggcggggcaaagtgtgatcacgtgccagagccacgggcgtaaggctaggctggcgtctgcacgttccctggtnnnnnnnnnnnnnnnnnnnnnnnnnnnnnnnnnnnnnnnnnnnnnnnnnnnnnnnnnnnnnnnnnnnnnnnnnnnnnnnnnnnnnnnnnnnnnnnnnnnnnnnnnnnnnnnnnnnnnnnnnnnnnnnnnnnnnnnnnnnnnnnnnnnnnnnnnnnnnnnnnnnnnnnnnnnnnnnnnnnnnnnnnnnnnnnnnnnnnnnnnnnnnnnnnnnnnnnnnnnnnnnnnnnnnnnnnnnnnnnnnnnnnnnnnnnnnnnnnnnnnnnnnnnnnnnnnnnnnnnnnnnnnnnnnnnnnnnnnnnnnnnnnnnnnnnnnnnnnnnnnnnnnnnnnnnnnnnnnnnnnnnnnnnnnnnnnnnnnnnnnnnnnnnnnnnnnnnnnnnnnnnnnnnnnnnnnnnnnnnnnnnnnnnnnnnnnnnnnnnnnnnnnnnnnnnnnnnnnnnnnnnnnnnnnnnnnnnnnnnnnnnnnnnnnnnnnnnnnnnnnnnnnnnnnnnnnnnnnnnnnnnnnnnnnnnnnnnnnnnnnnnnnnnnnnnnnnnnnnnnnnnnnnnnnnnnnnnnnnnnttgtaaaatgggctcagtgttgggccatgtcagaaattgagaccactagcttgtgaaaacttcagcaggagggagccacagtcagtgattcttggtggcattgatgttgagcgaaactcgctggcacccctcctgagcacaaagcttcctagttcatgtttccagccttccagtgcatacagggaagagctcgcttcctgtggaaaggcacaggggtataccactgaagctcattcaagagcctttagcatctcagagtactagcgcttccctcagggctgcttcagtaagtggtcactggattcagggacgcggtaccgaggagacctcggcttgatcctttgggcaagactgctgagaagaacagggacttagctctccaggtgagagagcaggtcctatctaggggagtgagaagccaaacccaagaaacagccttcagatggaggtatcatcaaccctcagtcatgcttgtattgacacctagtcctctagttctgaccccattgtctcagtggcaactggaagtatacctctactgaccactcatttggaggtcctggtcagagagggacctacatggcacctattaagatggggctggactgaagaacagtgacctggatagctgctgacagtatcctgggccaaaaagaaggaaaattctcatgggtgtggaggtggggactggactggaccttttgatccctctttttttttccttttatcctttcctgaaatcccatggtttgggttttaggaacttcagcttaaaggctggataggaaaaaggccaaaggtgagtatggtggtggctataggctactgagggagtgctgatccccagcaggagacctgaaggggccagaacagtttagttatgtgaaggaaagaatctcctttggctcctatgtagccctcctagcttcgtggaccattccattcagaaaaggaagggtgtgtgtgtcttttgtaagattgtatcacagtgtgtccaggcacagatctaggactaggatctaggacccacagccactctttcatttccatagtggaatggtagatggatacctcactgatgtgtccctcccctgcaggagaatataatgaaatccaacattgacaagaaattttctgcacactatgatgctgtggaagcagagctcaagtccagtactgtgggtaagcaggaccatcttcttccagacccaggggctactccttcactggccctgggtgaccagccttttcttccatgtctccttgcctcccaggtcttgtgaccctgaatgacatgaaggccaagcaggaggcactggtgaaggagagagagaagcagctggcaaaaaaggagcagtcaaaggagctacagctgtgggtcccccatcctctcttagcagtcctcccattatagtacagcgagtgcttgggaactcctgggggtgggtcagtctgttcccattcccattccatagggagaccccattttctgctttgggagcagttgtggtatctattgagctccacactggttctcactttccaggtttatctttctttctgttcctctgtaaaggtggtgagtcctttctgagccctttctttttactgggtgcctgaacagcctgcattgtccccattcctctctgtcccatgacccctgtgtcctttatggttggtgtgtcataattagagccctgccttttagcttgaagtaaactagggcaaaaagaatccctctggggtgctgggaagatctaccctgtgctaagtgaaccccatgctaggtacacagtggttctgggtcagagaaggggtctcaggacaggaacatggggcatgatggccacccatgccttggtaggaagctagagaagctgcgagagaaggagcgcaagaaggaggccaaacggaagatctctagcctgtccttcaccttggaggaagaagaggagggaggtgaagaggaggaagaggtggccatgtatgaggaggaactggagagggaaggtgagggcactgcccgccagagctctgtcctggcatttgggctgacatttgggctggcaaaggaagacacacattcatgttttagcctgagtcacctactgggcttgtggtccccagtttcacccagggtaggagaagaagacagaaatgaggcagcaatcaccatatttttaaagctaaagtaatagaattgctgtcagcgtagacttgagtcagagctaggccagtagcccctgtacaggacccaccagtgtgagaagttaccagagtactactagttcctggtatataaggatccagaagctgtcctttggcccacccaggataaactgaggcagggagaagatagtctggattaggcttgcctattgaaactttctgaaataatgggaatgttcatgaatacactgtcagatattgtggaggttttttgtttgttttgttttcgatttttttgagttgggtttgtctgtgtaatagtcctggctgtctggaactcactttgtagacaaggctggccttgaattcacagagatacacttgcctctgcttccctgagtgctgggattaaagcataggacagtatgcctggctactgtcaggtattgtaactgctcactacaggtggccactgggcactgatgtgattggtgaatttgatctatacctgctgaagtccaatgcttccaatgtatagtcctatgtatgtatatctgttctgtgcatggccaggctacacagtcagtatgggctcagtatgctcaggattccccaagagcccgggggaaattggctagatcaatgtgagcgagtcacatgatgagctctttagttgcagagatgggaggagacaggaagagtagatgataaagtgaaacagttatactgtaataacaggacaaaggatgcatttgagaacttggaataagttaggtaatagctgttatcttagccatgtaggcccctctcctctggttgcttcctgccactgtaattttttaaaaatttcttttattaagacaggttttcatgtagctaaggctggccttgaactccagatactcccaattttcctcaatgctaagattgtaagtgtgcactaccacactgggcccttccattttaattttagcagtatatttaacccagtagaggtcagtgtggcgagtagtgttattttttgttttacttgatttattttgagacagggtactataaagctcagtctggccttgatagtgatcttgcctccaccttaggagttctggattgcacaggctagtggagtggttgtcaacctcattgtgtatcagtgacattttttctttcagatagtctcactatatatcctaggctggcctccaaatttcaatgctcttgccttagccttctgagtgctaggattgcaggtgtgtgccactacacctagttcactggggcttttgaaaagcatggcttggtgggttttccccttccatccagagatttcatcttggggtcttaacaacaggacccgagcacccagcaccctggcatctattattttttttcttttagtttatgcttgttatttatcaaggttagtactgtttttgtttttttctttattttatttgtttatttacttttggtttttcaagacagggtttctctgtgtaactttggagccagttctggcacttactctgtagaccagactgatcttgaactcacagagatccaccttcctttgcctcccgagtgctgggattaaaggtgtgagccactactgtctggtggtttgtttggtattttttttttttttgagacagggtttctctgtggctttggagactgtcctggtactctgtagaccagactggccttgaactcacagagagccccctgcctctgcctcccaagtgctgggattaaaggtgtgggctgccacaaccgcacgtgttggcatgtctggcactcactgtgtaccaagctgggcttatactctgatcctggcatgcttctcctcttcagagtactgggattaaaggtatgtgccaccatggctggctaagtcagtagttcttaaaagatgctccaggggcctgagagaccttacagaggtccacagagatcaaaatcctttttagggcaggcatggtgcacacctttagtcccagcacttgggaggcagaggcaggcagatctctgagtttgagttcagtctggtctacagagtaagttccaggccactcaggactacataaatgtgactttgtttaaaaacaaacccacagaaccattttctgaaaaatgataagatgttttttgtcctatttgctttagagatcaccacaaagaaaagaaaattggggaagaatcctgatgtggacacaagcttcttgcctgacagggaccgagaggtataaactgcctagctctggtgttgactttgatggtgttcatgaagttggttttggagactctaacccagggagcaaccctgaacctcatcctttgtccatttcctcttaggaggaggagaatcggcttcgagaagagctacgtcaggagtgggaagccaagcaggagaaaatcaagagtgagtactatatagctagatacagtggttttacctgttatcccagcactcaagagactaaggcaagaggatctgaagttcaaggtcattttatttacatggttagtttgaaaccagccttggctacatgaaacccagtgacaaaagaaaacagacacaaaaacaaacaataagatgctagtagagttgggcatatgtggtctagagttggggcagtgagaggagaacagagctaaggcccaaacagttctcttgcaaatattcaccttggctatgtatctcaagggaactcttgagcacttgagtctggagaccaagaggcaactgttctttgtaggcgaagagattgaaatcacctttagttactgggatggctctggacaccggcgcacagttaaggtaggcagtggaaagactcttttgtcttgagttcagtggaaaatagctgacagtcttggcttgggaaacctctgtggctagtagagtgggtctttggctttttagagatatttttttgggctgttgtctttccatcccaactcactggtataactgcttctgcagatgaaaaagggcaacacgatgcagcagttcctgcagaaagcactcgagatcttgcgcaaagacttcagtgagctcaggtgaacacactgcactgtgtgtgtctgtgttgtacatctgtgaagagcctgcctttctggccagggtatcaaacaaccttctgactgctccacagctgtgaatatgttatgctgatcattgtgctccttacagaggagagctgtgaggctggagagatggctcagaggttgagaccactggcagctcttccaaaggtcctgagttcaattcccagcacatatgtagtggctcatatctgtctgtaactccagttccaggggacctgacatcctcacacagacatacattcagataaaacaccaatgtacataaaataaaaaacattttagctggtcagtaacagtgcatacttttaatcccagcacttgggaggcagaggcagccggatctctgtgaatttgagaccaacctggtctaaagagtgtgttccaggacagccagggctacacagagaaaccctgtctcaaaaaccaaaaaaaaaagaggagagctatgctcttttttcttaacttccttctgtagagagcttaggtgagagaactctgccttggtgatatggtctagaagtagaggacactgggactcccatcctaggttcactaaactacacagcttcccttaaagtaaggcttaaaacattgtgccaactctgctgacttccagttgctcatcccctcctatctctctcaggtcagcaggggtggagcagctcatgtatatcaaggaggacttaatcattccccatgtaagtcacttcaaccctgggtcatgcacactaatttcataggagagtcaccatactgctgtacattcttccagggatggtaggcatggtggtgcctgctcccaccctgcaggatgggctgcagggagtagtgggtgatagaggcctagatggatcatcaagctttcctttccccaccctctgctcctagcatcatagcttctacgatttcatcgtcaccaaggctcgaggaaagagtggtaagtgattgtaacttggcttaccctctagcttgctctaatatgttgggaagggcagtagtatcgccttgggattactgcctctcccctccagggccactcttcaacttcgatgttcatgatgatgtacgactgcttagtgatgccactgtggagaaggatgaggtatgatagttccagggtactgggcaggcaaaggtgccctgagcctgacatgggggttgcccttggggagaattcacaggaagacaaggtcaggtagtatggccctgaatcacagccttcattcctcagtcacatgcaggcaaagtggtgttgaggagctggtatgagaagaacaagcacatctttcctgccagtcgttgggagccctatgacccagagaagaaatgggacaagtacacggtaaggaggcagggaaggcaggcaggaagattaggtcctgagaagccacttcttggtggtcccactgctggactgggcagctcaaagtcagagggtgggagtcatctcagctttcagtgacctgcaaccttcctgcctggaaaccaaagataactaatctgatatggtggcacatacctttaatccctccactagggagattgaggcaagaggagcacaagttcctagctatcccaagctacataacaagatcactaaaacatgaacatgcacacacacacacacacacacaccacacacacacacacacacacnnnnnnnnnnagaaaaggagaggaagagagagagagagagagagagagagagagagaagagaatcagatatgacatgatagcatgatagcctgcccctatttatttcctggcttccattccttgtttcacgtgtccccattttctcacaccagatccggtgaacatccagaagttggcatgaccttggctctcctcagcgctcccccagggctccaggtgccctgatattgtcattactgattttgtcttttacaataaaaaagtacacattgagcagagtgcattataaagctgtgtattataagaacctgtgctttatttttagagaatgtgtgtgtgtgcttgtgtgcacatgccagaaggcaactatgggtatcattctgttgtccaacatttttttttgagacaggatctcccactggcctggaacttgctaagtacactagactggcaggtcagagagccccagggagcttgagggttgaaattggacatgtataccatcaatgttgggcttttaaaaatatggattctagctgggcattagtggttcacacctttaatcccaacactcaggaggcagaggcaggcggatctctgtgagttcgagatcaacctggtctacaagagctagttccaggacagcctgcaaagccacagagaaatcctgcctcaaaaaaccccaaaaagtatggattctaggttttaaactcataatctcatgtttgcaaggaaaacactttaccaactgagctatctcccagccctaaaacatttttgttgaactaacatttatataatagtttggtaattttatcaggtgtgttgagcatacctgtaattctagcactagtgaagtagaagtagagagatcatgagttttgagattagtctgggttgcatagcaagttccaggccagcttgagctacagagtaagaccctgtgtgtcaatctcttacacaaaccacaccaaaggattcttctcttcacctatgcattttacttattttttagacaggatctctctacatagccatagctgtcctaagaactcagtgtgtagcccagggtggcttcgaactcagaaatccatctgcctctgcttcctgagtgttgggattaaaggtgtgtgcacatcacctgttcatttttaaactatataattgagtgaatagattagtttattcacaatgcaggcaaccatcccctccatattctttgagaacatttgcattattccaaggacttctgggtttttagcagtcattccccatattgccaggtctagaccctagcagcttttagtctttctgtagattggcctcttctgcacatttcacttatctggaaactgatagggcaacaaatctgaacagaaaaggagggctttctaagggaaggcccagccttcccttccccaggacacttaatgttgttgaatggataactgttgttgaaaggatactgttgttcttgaatgtggggacatgtcctcaggcttggacagggctctacaatgaaagggaatacctcctttagcctccttcccaggtccttgtgtcctcttagctgcctcttccatggggtcttgccaagcaaccactcccagctcctctctctagtcccagcactcagggctactatgggtgccttggagtcactgttcacttgccacatctgtgtctaccgtgctcagtcttcatggggactggtcactgttatagctctaggggcaggatctagctgggggtgggcagtgcttcagcctccagtaccactggctatgccatttcaatggccagctctctccattcctcttgggtaagctaagacatagtggtccagcttggagagtagagaaagtaagctgggattcctttccttgtttgaggccagatgcttgtctgtactatggagagcatcttgcctctttggcaaacatgaatatttgatggtactatgtagtgagctttgctgtggctggaggaggcctggctgctagctaggagctcttaagtccttgactgcctatggtagagacatctgaaatcactctgaggagggaagagggtagagtaggtcagggtatcttgggagcacattgtagtagatagttagacctcatcatctactccagatgtatgctgctgggagtcctaggtgcaaattgtcttagttctccatgacaaccccaatctgtcttttgagaaaccatcagaaaagaaggcactgtggagaaaaagttctctctcggctatctcatccacatattagtgcctcaaatacactttttagcctccaagctccttgaactctacattcatatggatctgaggcccatgggactcagtcatacctagataggaactacctccagtcctgcagcttctagaaaaggaactccttgaaattcagtcctgagtcttgatgggaaaggatctattttttggaaacaacaccaagtgtctggggagtccttagggtcaagactaagaagacaaaggtctgtcagggaaggagaggtcagttttttgtttgttttatttatttgagacgagtctttttgtgtagccctgtctatcctgggactccttatgtagaccagactggccacaaactcatagagagccatcggtctctgcctcctgagttctgggtttaaagacatatcaacatgcctggcattcttgtggccaatagaggggcagaagactgccatggtggaacacaggatccctttgtctgacatgttgagctgtattatgttccttgttgcaataaaatacctgacagaagctacttaaggaagaagggtgagtggggctggacaggtggctcagcagttaagagtactggctgctcttccataggacctgggttcagttctcagcacccacatggcacctcagaattttctgtaggtctagttccagggtatctgacaccctcacacagacaaacatgtaggcaaaacaccaatgcacataaaatttaaaaaacaaagggtttattttgtgtcatagtttgacagtacaatccatcatggcagagaaagtatggtagcaggagcttgaggcaactggttacgttgcatccacattcaggaagcagggagaggtgaaagctagtgctcagctcagttccttttattcattctgggactctggcccataggatggtgctaactatacccacagagagagtctttatgcctcatttaattcaatatagaaactctcatacagacagaagggatcatgagccacagtgtaggtgctgggaactgaacccaggacctcttcaagagcagcaagttctcttattttctgagccatttctccagattctatttgttttaaaatgaggttttgtgtaacccaggctggccctgaagtcatattctgagcatggtcttcaactcctaatccttctgcctctacctcccttgtgtgaggactatagacatgtacccaccatgtatagctttggtgatctttttgttatgtttctgtatctgtgtttgggtgtgaacattgtcataatgtgtatgtaggccagagtacaacttgcaagagtcagttctttctttctgtaatgtgggttctaagaatccaactcaggtcctccgacttggcagcaagtgcctttatctgttgagctactgagctatcttgccagcctctctaaattttttatttgttttatatgtatgagagttttgtttgcatgtagataaatatccatggaggccagaagaaggtagtggatcccttggaactggagttacagttggttttgagtcaccatgtgggtacttggaaccaaacctaggtactctgtaagaacaagtgtttaaatcactgaaccacctctctagccctccaccttttttttcaagacagggtgtcactatatagctctggctgtcctagaactcactctgtagatcaggctgacctcaaactcagagattcacctgcctctgcctcccaagtcctgggattaaaggtgtgcaccaccactgcctagctctagccctcctcctaaaaaaatctgaaatataggtaccttttatgtatgaaagataatagcatttgtgccatctaatataagcatataaacattttcctgatttttcatgtatttttttttttggttttttgagacagggtttctctgtggctttggaggctgtcctggaactagcttttgtagaccaggctggtctcgaactcacagagatctgcttgcctctgcctcccgagtgctgggattaaaggcgtgagccaccaacgcccggcttgttaagaagattcttattttttcatcattttaaaatttattttacatatcaaccacagtttctcctcccccctctcctcctattccttcccccactccctgcttcccccatccactcttcctccatctccattcagttggggtaaagtctcccttgaaatcaacaaagcatggcatatcaaattgaggcaggaccaagctcctccccctccatcaaggctgaacaaggcatcccaccatagggaataggttccaaaaacccaattcatgcatcagggacaggtcctggtccctctgctagtggccccacaaaagaccaagctatacaactgtcacccaaatgcagagagcctagattggtcccatgtcctctccctaactgtctgtccagagtccgtgagctcccacaagctcagatcagttgtctctctgggtttttctgtcatgatcttgatccccttcccttgctcatacaatccctccttcctctcttcaactggactctcagagctcgtcccagtgcttggctgtggatctctgcatctgctttcatcagttactggatgtacgttctatgatgacaattacggtagtcactaatctgattacatctgtgcatatgaatgtaggtacttattgaggaggtgcctattgaggacagaggcatcccatgccatggatctggagttataggcatttgtgagctaccagacatgggttctggaaactgaacttggttgggtcctccacaagggcagtatgctctattaactgctgaaccacgtccttaacacccagtataaaattcatttttagggctggagatttggctcagtggttaagagcactggctgctcatccagaggacctgggtttgattctgagcaccatatggtggctaattactgtctgtaactccagttccagggtatctagtgccctcctctggcctctgagagcactgcatgcacatggtgcattgatatacatgcagataaagacccattaatataaaataaatttgtaaaactttaaaaaataaaattcattctttctggatggtgaggcatgcctttgattccagcaggtgagaggctgaggcaggagaatgaagagtttacgaccaggaccggagagttgtttcaccagttaagagcagcatttgttgcttttgcagaggaccagggttccacccccagcacccacatgacagctcacaactgtatgcaattctagtcccacaagatgtaatgccctcttctgaccttcaagagtactagacttgtatttggtatgcatttataaatgcagaaaaaccaaatcatgtacataaaataataaaataagctgtatggtggtggtgcacacctttaatctcagcacttgggaggtagagaccagcctggtctacagagtaagtgccaggacagccagggctacacagagaaaccctgtctcaaaaacccaaaccaaaacaaacacaaaagagaagccagtgtgatatcaaaagcctctaatcccagaacttggaaggtagggtcaggaagatcactaagagtttaaagacaacctagtttactgctctacatgtgagttatcaagctatatagaaagaatgtctcaaaaatccaaaaagaaggctgggggatggtttggtaggcaagaacctttgctctacaagaacatttgcttgaggaaatgagcttgaattcgaagcacctacttaaatagtcaatcagagctatacatgtgtctacaaccacagctttgggggagtggagacaggtaacaataagccaaagagcaataaaagacatcaagtgttctgctctggcctccatgcatgtgcacaagggtacagatgtttgccatatttatgtacttgtatacatgtgaataaaaaagaagtggtgcacacctgtaagcccaacttttggaaggtggtgaaggcaggaggattaggaattaaagatcagcttaagctatatgagaatctatctacaaataaacaatatgtagaagtgttcctagtgggctggagagatgactcagtggttaagagcactgactgctcttccagaggtcctgagttcaattcccagcaaccacatggtggcttacaactgccttgaatgagatctgcatgcaggcagaagactgggtacataataaataaataaaatctttttaaaaaaactgttcctagtaacattatgcaaatagcccaagagggaagcaattcaaaattttgtcagttaatgagagaataaataaattttggcttatctatgcaacaggatattagctggcccaaaaagaaagtcttgatccatggtataactatgataaaacttgaaaatatttttttttgtttttcgagacagggtttccctgtggctttggaggctgnnnnnnnnnnnnnnnnnnnnnnnnnnnnnnnnnnnnnnnnnnnnnnnnnnnnnnnnnnnnnnnnnnnnnnnnnnnnnnnnnnnnnnnnnnnnnncggctaaaacttgaaaatattaagtgaaagaatgaacataaaaacacatttatattgcatgactgtatttgagatgtcctgaagaggcaactccacagtcagtaagtacatgactgcttcccagagcttgggtatgtatgtgaggttaatagagaatgataggtaactgctacagagttggttttagaagtgatgaaaatggcacttgggaggcagaggcagggggatctctgtgagtttgaggccagcctggtctccagattgagtgccaggataggctccaaagttacacaaagaaacccggtcccggaaaaacaaaaaacaaaaaacaaaaaacaaacaaaaaaaaaaaagaaaaagaaaaaccaaaaagaaagaaaaaacaaacagaaaaagaggtgatgacaatgtttcagaattagatagcagtgatggctgcacatctttacgattatattaagatggcactgaactgtatacattaaatacatgacatgaaagatgaattatatcttagtaaagcacctgtaattccagaagatgggaaggtgaagctggaggatcattggaagttcaaggccagcctgggctacaagtgtgaggcacggtttcaaagcaacgtggagaaaaaagccagctgtggttgtgcaagaccaaaataacacattacttggagggtgaggtacaaggttggtctgttctaggccatactgcactaaagggaaaaataaatgaaagaatgaaaaaggagctgggtgttggtggtgcatgcctttaatcctagcacttgagaggcagaggcaggtggatctcagtgagttcaaggccagcctggtctacaagaggacagcctccaaaacaatacagaaagaccctgtcttgaaaaaccaaaagaagaagaagaagaagaagaagaagaagaagaagaagaagaagaaggaagagagaagaaagaaggaagaaggaagagagaagaaagaaggaagatggaagagagaaggaagaagggagaaggaagaaggaagagagaagaaagaaggaagatggaagagagaaggaagaagggagaaggaagaaggaagagagaagaaagaaggaagaaggaagagagaaggaagaagaaggaagagagaaggaagaaaaaggaagagagaagaaagaaggaagaagaagaaagaaggaagaagaaggaagaagaagaaaagaaaagaaaagaaaaggggggaaaagagaattagaatcccacattcagggtcagagtgggttgttgaagaaggagaggtgaaaatggtagtactccaagctttgtgctgggtattatttgtacattattaggaccattggggaaagagttagagcgcaatctttgctagtgtgtttttgataggccgacccaagcaaaatcttgcaaccacagcaggtggcccagggctcccagaggaggagcccactcgcgctctaggcccaagggggtgtggcgccgccgcgcacggattccagggttgctggaggcagcaagcgaggaaatgggggtgtagacaggcgcgcgcctaggactcagccattgagcgaagggggtcatatctcaagaagggatccccagtggcccatgggcggcttnnnnnnnnnnnnnnnnnnnnnnnnnnnnnnnnnnnnnnnnnnnnnnnnnnnnnnnnnnnnnnnnnnnnnnnnnnnnnnnnnnnnnnnnnnnnnnnnnnnnnnnnnnnnnnnnnnnnnnnnnnnnnnnnnnnnnnnnnnnnnnnnnnnnnnnnnnnnnnnnnnacgtggccagcgctggccaccctgagtcagccgcgttggagggacaggtaggtggccccatccttacaaaccttgtgccagtagtctgatggatgtcctgtattcagacagcctggggttccagatggtttcaggggtcaggccttttcccggccttttgaggctcatcagacactacgtgccctgagcaagaagaaagagccaactcgattgtagccccattgcctgatactacccttttgtagaggagcagcagcatcagtgagcattgctgtagcctctgcattgactaaggtctccgcaggtctgcccaggggtgcccccaatgggggcagggccggctggattggtagtaagtgggaagcattgtgggagagcgggctgtggacccagatatttgtatggagctttccttatcaccgtgctcttttgctggcagggctgcagcagaggtactgggtgcctctgtgatgcctgaggttgccacttagaggtgggggctggggtggggtcttgggctgcaaatcacgactttccaggtctccttcccaatgtgtccctggctgctttctaaaattggctttctgcagagtgtagaaaaggtgagggtatgatgcatccgcttttctcttttgccttccattcttctggctgttgtgtgaggggtctgggatgcagacctgacaaaagaactccagagagctgatcaatctgagtagaaacttggcagtttcgagctggaattgctccctgttccaggaaatgctggttttcttttttcttttctatgcctccttgatttgattcccccccccccaatgctgagtccctcctgtgtctgtgtcccttgggaaatgggcagtgagagggtagcacagagctctgttccattgactgcagagactgctctgctgtctttgcagccagaggctggcagggtgtggcctggggatgaagtgccagcactgtccctatctgtatgggctgtgctccatatccctaagcttcaactgtatttggggatgctgctcaactgtatttggggacactgcttcctacatataagactttggggactctcaaaagtgggttagacccctctgctcctacccctctctgactaacctctggatcttcagggagagccacacagacctggcagagcatctgtctgcctgtatctgagcaaagcttgacttatgtctgtcttggtgagagtcttggctttgtgttgcagcagaagggccagacagcagactcctggataggcaggcagccaaggccctcagggagaggaaagcacctgaggccatgagctagagaagtggtggtactgaaactagcctcaggccttaattctccagagctttgctctaggactcctgttggcagtgccactcacagagaagcacctccacccccagcttgtgattgttctcttagtgcctttctccttccctagctcaggcaaggggtatttggggtcctgttgatgctctcctgtgccatcaactgctctcagccttaggatgtaatgtttgggtcccacttctggtacatcctcccaccctatcttttcaagcatctgcctctgctgcccccttgggtgtggcccagttgagacaaggcctcttggcttctttccagtacaggggtgggggatgattgatggcttccaagcttgcctgtgcttgttactcattcatttgctgtattagaggcccctcccctctaccagcctcagtcaccatctggggctctgtcatgttggttgagttgccctgcccctctgtggcatggagcctgaccttccagggtccctgggccaggcaggtcagggggagggagaataacttgggtctggggcctctgactcccacttgctgtctctcctcaggcccgtccctgatacatctgccagtcatgcccactgtctgccttctcctattgctattcttcaccataggagggtgcctgggtagcagcaggccctttcgtacctttgtggtgacagataccacactgactcacctggctgtgcaccgagtgactggggaggtgtttgtaggtgcagtgaaccgagttttcaagctggcttccaacctgactgagctacgggcccatgtcacagggccagttgaggacaatgctcgttgctacccaccccctagcatgcgtgtgtgctcccatcgcctggtgcctgtggacaatgtgaacaagctactcctcatagactatgcagcccgtcgtctgatagcttgtggcagcatctggcagggcatctgccaattcctgcgtctggatgatctcttcaagttgggtgagccccaccatcgcaaggaacactacctgtcaggagctcaggagcctgactccatggctggtgtcattgttgaacagggccaggggcctagcaagctgtttgtgggcaccgctgttgatggcaaatctgaatactttcccaccttgagttcccgtaagctcatcgacgatgaagacagtgcagatatgttcagtctggtgggtgagccatgcctctttgttgtgttctctttcccctgcttcttatgagtccagtccttattcactcctttccttcagtgctggtcctgcttcttgggaaggaaggctttggtttgagaggggaatttgtgatcctttactatcacagagatgtagaccagctgctgaggacagaaaagtgggcacaattcacctgtggaaagcctgtagagaggctgaggttaccttgcactctgtggcatgaattccagtaattttccaggcagggcaggttggagatcacagaggaagcctttggaggaccacattgttagaccagggttggaaaatcaaggtggagtggggaggaggcctttatcccgtactcatactttgttctactctccaggtgtaccaggatgagtttgtctcttctcagatcaagatcccttcagacacactttccttgtaccctgcctttgacatctactacatatatggctttgtcagtgcttcctttgtgtacttcttaacactgcagctggacacccagcagacactgctggatacagcaggcgagaaattcttcacatccaagattgttcgcatgtgttcaggagactcagagttctactcttatgtagagtttcccattggctgctcttggcatggtgtggagtaccgattggtgcagagtgcccacctggccaagcctggcctgctactggcccaggctctgggtgtgccagccgatgaggatgtcctcttcaccatcttctctcagggccagaagaaccgagccagcccacctcggcagaccatcctttgccttttcaccctcagcaacatcaatgcccacatccggcgccgaatccaatcctgctaccgtggggagggcacactggccctgccctggctgctgaataaagagctgccatgcatcaacaccgtgagccctttgcttgccctgctgtccctgtgctagacatgacagctctgtgcctttcttgcctttctgcctcctactgggtggctatctgtccagtcccaggcttggcatggtcctgggagtaacacctttgttctgataccggctttacgtttcttgagagccttactctcttcttatgtcttgaccagtgtcctatttgtatattgccaccttcattttcctgacactatattaattcccagctttcttcttgctctattcccaggcttctcttcccttttcctggtttctatccccagtcccatttcccatggggtcctaaggcaaatcgtcaggcatgtttggagggcagtagcttctagtttctgctcctttatagaatgagatctaatagcatctgtctatcttgaactctcactcacccctcctgtgtcaccagcccatgcagatcaatggaaacttctgtgggttagtgttgaatcaaccattgggtggcctacacgtgattgaggggctacctctgctggccgacagcactgatggcatggccagtgtacatgcacatacctaccaccagcactctgtggtgttcatcggtacacgcagtggtaatctgaagaaggttggtgctagaacccttgtgttatgggattgggaatgttttttacactatgggaagaagggcacacgagcctggataaccctgaacaggttatgatgacttcccaggttaggccccaagagctgagtcctgctgcttgggtggctccaccagcatttttttttttagctgaacccaagggagcctttgccttatccttagcctaaggctgtggttcttggagctataggccttcaaactgagtgcaggctcaaggaggtcctgcctgacttcaattcagcagcaatctagaaagtccttggctggagaggatgctctgggtacagggaactatggtagcataaagctggcctgtcatttctctgtcctggtcttgtggctcaggtgcgggttgatggctcccaggatgcccagctctatgagacagtccctgtggtggagggcagtcccatactccgagacctgctgttcagccctgaccaccagcacatctacctcctgagtgagaagcaggtgggcccgtggtgggtggtggtggatggtggggcaggggtgggctgtgtgctgatgtggctgtccccaggtgagccaactcccggtggagacctgtgagcagtatctgagctgtgctgcatgcctgggctcaggggacccacactgtggttggtgtgtgctacagcacaggtgagggcagagggtgagggacatgggggcagcaatgggctccctggggccattatcttgagagacagaaggatttaggagggccttgccagttggacagcagccagcaacacttgctataccttccttcacccatctgcccagtttccccagccttgagctttgagccttgagccttcccctccctcccttgtcctccactttctccagctaatgagcggaactttcaccctgagtgacgtcccttggatctcaggggatgaggccaaggcacactgttgcctggcagtatgagctgggtatgctgtcctctgccctcctcagcctcttactgaacccccatctgaaccttcctgggatagtgctcagactgctctggcctgtccccatttcaggtgctgccgtgaaggggcctgtccaggtgcctctgccccacatggctttgcagaggagctgaacaaatgtgtacaggtgcgggtccggcccaataatgtatcggtgacatcccctgcggtgcaggtaagggatatggagggtacttgggtgcatgtatgcttcatgaggaagggctacaccctgctctgagccctctgcctcccccagctgactgtagccatgcgcaacgtgccagacctcagtgtgggtgtcagctgttcatttgaggaagtgactaaaagtgaggctgttctgctgccctctggagagctgcgttgcccttccccatcccttcaggagctccagacacttaccagagggcatggtcagtggactaggggtattttgggtgttgtggggtagcacaggatcccagggtagttgatgatgaccatgtggcttgctgtaggggccactcatactgtgcggctgcagctgctctctatggagactggtgtaaggtttgctggggttgactttgtcttctacaactgcagtgccctccagtcgtgagtacctggtccaaaatctgtccctagatgtggagatagaaaggtgctttgggatatataaaacttgcagtgtggttgtctctagggctttgggggtgagctgttgggtcttcctgctctgtccccacttctctccaatcctgatatgcaatttgtggcttatgcaggttctgcctgccctcttcatttgttccttagtgcattttgtgggagggtgataacagggtggtgtgacgttctttgttattttctgaagccacttccatctccaggtgcatgtcctgtgttggcagcccttactcctgccactaaagtaagtaccgtcatatgtgtaccagccacccacacgagtgctccttccaggagggcagggtccacagccctgaggtgaggtggtgcagtgcatggcaaaaggctggggctccttgggggctcgcctctcacttttttgtttgctctcctatttccttggacgtgaagaaaggtgggtagcacagcatgcctctgacagttgttctcctcccagggctgccctgagatcctgcctcgaggagacctcctgatccctgtgggtgtcatgcagcctttaaccctgcgggctaagaatctgccacagcctcagtcaggccagaagaattatgaatgtgtggtccgtgtacaggggcggcagcatcgggtacctgcagtgcgctttaacagcagcagtgtgcagtgccagaatgcctcggtgaggtccccggtgggccagccagggatatttttgttggtttgtttttggtttttggtcaatgcccaacttactgatctggaaacctctggttgtccctggaaggtccttcttagtctttttaccagagattcccaagttgggcaaggattttgcttatcttctttgtgcttatgtggttccatttttcttagtatttctatgaaggtgatgagtttggtgatactgaactggacttctctgtggtctgggatggagatttccccattgataagcctcccagcttccgaggtgagggacggtatgggtctaaggagcatgctcctggggcagagttgacactgctggggcaagtctggaggccctagagccccctgcttctctgccactgcctgctccatcagtagtcccctgtgcctgcagcccttctttacaagtgctgggctcagcggcctagctgtggcctctgcctgaaggctgatccccgattcaactgtggctggtgcatctcggagaacaggtgccagctgcgggctcactgcccagctcccaagagcaattggatgcacccaagccagaagggtgcccgatgcagccatccccgaatcacccaggttagtttcacctactagtcctaccttgcctgctggacatgtgtgagtctggcctgatctttttgccttttatcctgctccacagatccacccactcatgggacccaaggagggtggcacctgggtcaccattataggtgagaacctgggcctcacttcccgtgaggttggtcttcgagtagccggtgtacgttgtaactccatccccactgaatatgtcagtgctgaaaggtgagtgtggccatgtgagcatacgctgtccttgtgtaccacagctggtcctgaccttctgtgactcctaggatcgtatgtgagatggaggaatcgctggtgcccagcccacctcctggccctgctgagctctgtgtaggtgactgttcggctgacttccgcacacagtcccagcagctctacagctttgtggtacatggcctaccagttccttccccttcccaagccttctcccttccctaactggggggatgtggagtggcccttggatggggttggctactacctcctctcaagggcttcttcttctccagacaccaacatttgaccatgtgagtcctactcggggcccagcttctgggggcactcggcttaccatctctggaacttctctggatgctggcagcagggtcacagtgattgtaagagatggcgagtgccagtttgtgaggtgggcctgaggataagcagtctggagttgagcattatgtggagggctatggggatagggtagctgaaggtcacctgcttcaaacttactgcttacttatgtaggagagatgccgaggcaatcgtgtgtatctcacctgtctccaccctgggccccagtcaggcccctatcacccttgccattgaccatgccaacatctccagccctggagtcatctatacctacacccaggatcccactgtcacacaccttgagcccacctggagcatcatcaagtgagaccctgaggagaatggggttgagtactgagttggggtgctgagtttctctcttggggccttacctgttactggggccttggggcatcaaatccttcctgaacctgcatcagtaggggacacagacttgcccatatagagcctggtacttattaaatgatacaaggttagaggtgctgaggtctcagaaaaaccttggtaacttcagggcagggtggaggagggaacctgagacctttacccatctctgcagtggaagtactgccatcactgtgagtggaacccatctgctgacggtgcaggaaccccgtatacgggctaagtaccgtggtattgagaccactaatgtgagtagcagcttcccacccctctcccacccttgctacttactcaaggcttcatgtacccaggtgattgctgttgtcttcacagacatgccaggtgatcaatgacacctcaatgctatgtaaggcccctggcatcttccttgggcgtcctcagcctcggtcccaaggtgaacaccctgatgagtttggcttcttgctggatcatgtgcaaacagcccgctccttcaaccgctcttccttcacctactaccccgatcccagctttgaaccaattgggccatctggtgtactagatgtcaaacctggctcacatgttgtattgaaggtactggggacagggatagagggtagaaaggaggggaggagcagagagctggaaaacttgaccgtttctgtgtggattatccattgctagggcaagaacttgatccctgctgcagctggcagctcccgcccccacnnnnnnnnnnccgcctcaactatacagtgctgattggaggacagccgtgtgcactaactgtctcagatactcaacttctgtgtgattcccctacccagacaggccggcagtctgtcatggtacgtataggcttgggaggccaccagggcagccttgggtgtgcatgagagttggttcaccttgagcctacacttacaggtgctggtaggtggcctggagttttggttgggtaccctgcacatcactgctgatcaggcactgaccttaccggctatggtgggactggcagcagggggtggactcttgctgctggccatcactgctgtgctgatcgcctacaagcgaaagactcaagatgcagaccgaacactcaagcggctccagctccagatggacaacttggagtctcgtgtggccttggagtgcaaagaaggtgcctaaagccaggagtgtatcacagtatgtgagagctgtgtgacttccttgcctgttgctcaacttattcaccctaatttcccccagcttttgctgagctgcagacagatatcaatgaactgacaaaccacatggatggtgtgcagatccctttcttggactatcggacctatgctgtgcgcgtgcttttccctggcattgaggcccacccagtgctcaaggaactggatgtgagccccccccctgtagccagtccatgttctatttcccccagagctaccactacttacattctaagactctctggtccccacagactccccccaatgtggagaaggccctgcgcctatttgggcagctgctgcacagccgtgccttcctgctcaccttcatccacactttggaagcccagagcagcttttccatgcgtgaccgtggcactgtagcatcactcaccatggtggccctgcagagtcggcttgactatgccaccgggctgctcaagcaactgctagccgacctcatagaaaaaaaccttgagagcaagaaccacccaaagctgctattgcgcaggtatgtaactgtcttgtctggcctctcccccagtctactcttccatttcctatttccagcccctccatttgttcaatccccacccttagcaggccagggccttaggacctatctcttgccacaggacagaatcagtggctgagaagatgctcagcaaatgtttcacattcctgccacataagttcctgaaggtgtgctgggggactgggcagcaggggaggaatgttcaggggtggtgcagttaattgataagccagccaggcagccagctatgcccttgaccctgggtgcaggaatgtgccctccagccacttttcctgctgtactgtgccatcaagcaacagatggagaaaggtcccattgatgccataacaggagaggcccggtactccttaagtgaggacaagctcatccggcagcaaattgactataagactctggtgagcatggggcagtgtgagcaggagatggggtggaggagtcttgctcaggattgatgctggggttccttcactcttagactcttcattgtgtgtgcccggagagcgagggcaatgctcaggtccctgtgaaggttctcaactgtgacagcatcacccaagccaaagacaagctgttggatactgtgtacaagggtatcccatactctcagcgccccaaagctgaggacatggacttgggtaaggtctcttccttttctcccaacccacacctgccaatccttcccaggggactctcatactctatatctgggctctgttccttaagagaagtgggcctaaggtcttgtgaagtaaatgtccctaagagctactgtaacctgcagaatggcgccagggccgcatggcccgcatcatccttcaagatgaggatgtcactacaaagatagagtgtgactggaagagagtcaactcactggcccactaccaggtgaggaactgggagcctattcacccccaggtccacctacgagcagtagccaggtctgctcccagtcgttatccctatattcataagccctcctcatagggccttggttgccactatacatatatacattaagagtctagatgagtggtggccccttgacttcctgcactgcctctttgtctttggacctccaggtgacagatggttccttagtagcactggtgcccaaacaagtgtctgcttataacatggccaactctttcacctttacccgttcactcagtcgttatggtaggtatcctcatcatggtggcctctgttggccctgtgccctttaattaaggttgtataagtcatgttaggaagccccaagtagctgtcttgatccatctggaaacaccttcattattttgggcctctgggtagtctccagttctgtagcacctagtagggaggggtggcaagaatagatgggtttcacaaaggttcctgggctcttggaggagaatggagcaagagggtggataatggccagggcctaagggtcacatctgtcctctgccctagagagcttgctccgtgctgccagcagcccggatagcctccgttcccgagcacctatgctcacacctgaccaggaggcgggcaccaagctgtggcatctggtgaagaaccacgaccatgctgatcaccgagagggagaccgtggcagcaagatggtctcagaaatatatctgacaaggctgctggccaccaaggtgtgggcctgccccaggctcccttggtacctgcataaacaccttctagcccagtcttagccatgagttgagctggttttaccaggcaggggctactttctcagggcctttgcagtagtacctctaggcctgaggtcaagagcaggtccattttaggaatgctggccttcagggggagttctttactgagcttttttgcccctgtctgtcatatttggggaactttgtgacacagttgccttattgtcactcgtagggcacgttgcagaagtttgtggatgacctatttgaaactgtgttcagtactgcccaccggggctcagctttacccttggctatcaaatacatgtttgacttcctggatgaacaggctgaccagcgccagatcagtgaccctgatgttcgccatacctggaaaagcaactggtacttatgggttcctggctgctgttcgcccttttgaggatgggtaggaggaagaggctagacttagccaaactctaaggcccatagaggcaggttgaatgacagcagaatagcctttcaggcaggagagatgggacttggcctggaactgaatatgagtatatagaaggtgggtactgctgggttgtgcatatgggaagtgctagtctagcactgggattggccatttttctccagggcactaaacagggtagagatattgatggcttggcacaggtagagacagtggaaacttcagggatggaggttgaggacagaaagccatctgttcttatttctcattgcctgagtccagcagaatattaaataaaaagccatttaccctaaatgtgtccttcctgttacctcaggagaagacatgagctggctagacagtaacaaggtataaaggaaggcagtggagaaagggggacccatagggccacttgggagtctcaaatgtatgtccctctgtacagcttacctctgcgtttctgggtaaatgtgatcaagaacccgcagtttgtgtttgacatccacaagaatagcatcacggatgcctgtttgtcagtggtggcccagaccttcatggactcctgttctacatcagagcaccgtctgggcaaggactccccttccaacaagctgctctatgccaaggacatccctaattacaagagttgggtggagaggtgggccttgtgagactgctgtgtgggcatggtggcaggctggaactggctgcctaaacggcctgtctaaggctggccaaacactgatgacatgagttttggcttttctaatatgtgcaggattgactcacccagggtctctacaggtactaccgagatatctcaaagatggcatcaatcagtgaccaggacatggacgcctacctagtggaacagtcccgcctccatgccaatgacttcaatgtcctaagtgcactcagcgagctctacttctacgttaccaagtaccgtcaggaggtatgttgatgcaccttacatacccccagttacatagttctgatgatgcaattaggggcaaaggcatggaggttgatggattgaggaatgcctcaaggatttgagcaagttgggacacagaatctatcttgtatcttgtctacattccatcccttgcctaggaccagcacaggtaataatttccctagatgctgggatttaaggaatacaggagagaaaccattagctggagtatagagttcccactgaataagagttaaaagattggaaaatcagaagaggtgggccaaggggtatggggtgggtgttgtaatttttaaaaaagcgacattcgagagaaagatgccatgggacagagcttgggtagaggtttttttaattgggggaaagtaaaagggaaaagcaggggataggggagactgacctctggggacaggagtggcagaagagaaaagaaaggcagagagaggggggagagagaaggagagacagagaagcagagagagagagaggggaggagaaagaacacactaaaatagggagagaaagagaaggatgggaggtgggcagggccccctttgttcttttttttttggtttttcgagacagggtttctctgtgtagctttggaggctgtcctggaacttgctcttgtagagcagtctggtctcgaactcacagagatcctcctgcccctgcctcctgagtgctgggattaaaggcatgtgccaccaccgcccggccaggcaggacccctttaaaagggaacatagtgaatgtgcacaggtggtgctcttagtggctgcagttgagagcatatcctgtcagaacccaaggacaggccaatacagatgcctgaatactaacaatgggacctgaaagtaggtgcatctagctattaccagggcctgtggattttgtggttggagatgccagcagacagaggaacacataaggctgtggaggcctggattcatgttcttctgaataactggatgttggtcacaagctgaaatcaaggatcactgtgggacttcttcagcctaagcaactgacaggatgaagttcactgctataaaaacagtaatactataaaccacaggaaagactgtagatggaacagctttgtggggcccagggaacaaaaaccaagaatcttcagaaccactcaagtaatccatggaaagtgctaaagccctgagggaacatagagcatcttgggataggtatcagtgatggtgtaaaagttgattgcatcagactgggaagattgagtccaattatcattctcctgctaactagactcaaaattacaattatgccaggtataggagtatagattcaggggaagtctttggatgaagtacacttttggaaaccatagatggaacgtaaagccctgagccaggggttggggaaaatggctcagttgattgagtaccttctatgaaagcatgaggaccagaatttggattctaagcacccatgtaaaaatattggataaggtggcatgtttctataatcccagcactggagatggtactggaggagataggcagatccccacagctccttagtcagccagtctagccaatcagtgagttctatgttcaatgatagaccctatttcaaaaaataaggtagatgggctggagagatggctcagcagttaagagcactttctgttcttccagatgatccaagtttgattcccagcacccacatgacaactcacagccctctagctccagttccaggggatctggtctcttcccctggcttctgtggaagattttatttatttatttattatgcatacaacattctgcttccatgtatatctacacaccagaagagggcaccagatctcataacggatggttgtgagccaccatgtggttgctgggaattgaactcaggacctctggaagagcagtcggtgctcttaacctcacccatctctccagccccactcatacacatttttaaaaaggtagagaatgatagaaaaaagataccaggtattgacctctggactccacacacatgcatgtgtactcacatgcacatgtgtacacagacaaatgcagatgtgcatgcatgcacagatgtattaaagattaagcccagtcaggagttggtggctcacgcctttaatcccagcactcgggaggcagaggcaggcggatctctgtgagttcgaggccagcctggtctccagagcaagtgccaggacaggctccaaagctacacagagaaaccctgtctcgaaaaaccaaaaaaaaaaaagattaagccctggccactcatggaacttttagttccagcacttagcaggcagagacagccagttcactgtggttcaaggctaacctggtctacaaagtgacttccagaacactcaaagatacatagatactgtctcaagaaaaaaaaagaggttcaccaagagagatcaaggggccttagagagagatctggtactctgaacccctcacaagtcaaacaggaaaagttgaactagaagaggactgggagggaatccagaagtggctggcagagtcaaccctgtatcctgagccagatccctgcatggatcaaggaggatggagtggacagatttgccaagaagatgttggagtttcagttaggagggaacaggaattggtaacagcaagtatggcccactctccaaagaagccatgatagaagagaaagctctgtgcttggggatgatattaggagtcaagataagtaggtggttttgctgagagattagaggtttggagcttgagctgggcacacacactgaagcctgtgggagggaagagcccatctgggaagcaagggctttgtgcagaagtggagccctgccttggagcctgttccaattgatcttcatctcctagatccttacctcactggaccgagatgcctcttgtcggaagcacaagtttcggcagaagctggaacagatcatcagcctggtgtccagcagcagctgagtggggagatggtgaggagggggcttctcacttctgagccatcctcccatccagggagtggctggctgtagcctgagtctccagggctgagacccagatctggtgttgttggggaggttaccaggccaagatgcccccatcacacctgggccctcttcgttagtgccttgctttgggtcctgcagggggagggggtgacaggaccaagctccctcaccagcagcagcaatacccccaccctcttgcccttgtgtttccatgtcaagaaagtctttgccctcttagctctgtacaccctacacacctatttattaacctaaccaccttaactttcatatgtaaatatacatgccccatgggatattgctagcctcacagacctgcgtccttggttgatgtgggccctgcttcctttatgacattgccagccttggtttagtatctggcatctcacctttgccatgtcaggccccacttgtactaagagagcctcagtaccagcagcatttggggttggattatacatctgaagctgccctcagattggctgggcctggccagtgtccctcttcagatgtttcaggtgtcagaccacattttcatggggcctgttgtctctgagacaactataaccaggttgtgcttgggcctgatgtgggcctggacctctgggacattcctcgtgtccgtactgccaaacttcctcagtgttgtaggcatttgccctgaaccccctgagcctcagctgccccattatgtgcccatctctaggggacaaggtggcagtgccttactgttttgtgtctcctcctgcctcctctgaggaatatggccctgtctgatagtcccagaccccaccacactcttctttcgttgcatgagtttttctttgttgtaattttttcctaattaaatgttgggaaatggggtcagtgcatgtctttgtctttggcgcaagtgggtagaccattgggctgtggataagcttgactgtgggaggaaataataactctttgtaggatttcttatgatttgaggaagatcatagccatgggtagtccattaggcaatcttggtggccctagcttcaagactgaataagtctgcttccttctccttgcatccactgtctctactcagttgtgtccatctccctgcttctgccttgcccttttagcacattgttagttggagacaaagagatgctgttaagaaataagggacatgtccccactgtgttaaaaaaattcttcagtggggactggagagatggctgggtggttaagatcaccagttcctcttccacaggatctaggttcaattcctagcacccacatagtgacttacaattctttgtaactctagttctaggaggtctgatgccctcttctggcctcctcaggcaccaaccatgcatgctgtatttttgcaggcaaagcactcatacacaaaaaataaaatgaaactaatttaaaagaaaaactttcagtggcttcacttataccccaaattctgaagatgtggcaattaataggactataactgtggtggacctacctgtgtgtgaattactcccatcactttttagatgatgtatatgtggtgaagataattgtacaattttttaaaaaaggataacttgagtttgaggagatagctcagtggttaaaagctttgtcacacaaacttgaggattggagtctggacagtaattaacagcgctcagaaagcagaggcaagggtatcctgggacaagctggataaccatgctagtcacatagacaagctctgggttcaaccgaaaaaaaaaaaaaaaccctgccttattgaataaggtgctcgagagtgatagaaaaaagattctcaacatcaacctcaggcctccacacatatacaacaggttcatccatagacactgcatcatgcatataatacacatgtgaaaaataaaacagggtagcttactcctagtacttcagaggtgtcagcaggaattcatgggcagcttcagctacatactaaactccaggccagtgtgggccacatgaattatctcaaacaacaagaggaacaccacacctggcttgtgtgattctcttttttgtctagaagttaaagaatgccttgttttgcagctgtggctgcctcataagacctgtacaagatcaaggtaatcaacagtctagtgttgaggaggagaggttaatgaggtcccatctataactggggagcttttaacagtggatggtttcttggagaaggaaaaattagtttttttaaggatatggccctttacaggtcaaccatgtcccagtggatggccccacacccaggagtacatgggccgcacaaattggacttgatttattttgaaaaagaggacatgggccagttggtggtggctcatgcctttagtcccagcatttgggaggcagaggcaggtagctctctgagtttgaggtcagcctggtctccagagcgagttccaggactgccagggctacaccgaaaacccctgtcttgaaaaacaaaacaacagatgaggacacagatttggggagggggttaaggaagcagtagtggatctgggaggagttaagagaggagtggaggtgaacaactacaatacattatatgacattctcaattaatttaaaatactataagtgccttgtttgggaggcagaagagatggctcagttggtaagggcacatactgctgttttcccagacaactagagtttagttccctgcatccatagcagagaactttttttttttggtttttcaagacagggtttctctgtgtagctttggagcctatcctggcactcgctctggagaccaggctggcctcgaactcacagagatccacctacctctgccccccaagtgctgggattaaaggcatgcaccaccaacgcccaatagcagagaactcttagctgcagctccaggggatctgataccctcttctggcacccaggggcacttgcactcacatgcacaaactcaggacacacacataatttttttttaaaaaaaattaaatcttgtgtctgaaacatgatgtcttcagtaatagggacttacattcatttctccagctcctgtttccaaaataaagattaagaaaaagagatgaaagccgggcagtggtggtgcatgtctttaatcccagcactcaggaggcaggtggatctctgtgagttcgagaccagcctggtctacagagtgcgttccaggacagcctccaaagccacagagaaaccctgtctcgaaaaaccaaaagaaaagagattggagagaatgctttaataacagagcccatcagataaataaatgacaccaactttagcagatgagaccctgagtaggaacttggaacggcttttaatttcagggcagaacactgaagaaaaggcaagcagaaggacagaacccgagaggcacctaatggattccagttgaaagttccacaggacatgggagcacaagtgtgtgagggaggtgatgaggcctgagaaaagtatctgcccctgtgataaccgcacagcactgaaagcaagacagggactagtagttgcctctttttttgagaggcagaggaattattagaagagtcatgcctcaatagtgaggaaaacctatttctatacacagagttgctctgttccatgcagcacacactcaaagtaacatacagaaggctcacatgctttccaagggatacaaacaagaggaaaacttacctcagatagaagaaaataaatcattagtcattcagagtagaaaggaagaggcacaactgcctttattctgaggaacatgataacctatagtgaaatatctaatggtatctgtggtgatatcttgtttgtacaaatgaagcttgattgaagatcagagggtagagctagccagcagctaaccatagacgtctggaggtctgtgcagacagataggaagtgagatggctgggttgagagaggaatatagacaggaggaaacaggaactcggtctcttctgctgggaagctaaagagttaaaggtgactttggtttgctttctctctgatctctcagcatgtattattaaggcctattagaacttgtgttacatatttgtacaaacaagatatcaccacatatccccctttttgtctaaaaatagttataactaatataagaaaaactatatacaataagtacaataactatacaatatattcaggcaataagtgcatcaacaatgtctagtccatttgcatttgacaaattcagagaaaatacttcattatcctatcttggcgagtccaaagtcttgtacataatttactttctattctaatttgcgttatcaaattatctttaaatgtctcaatcttttacactttacatatctttagtgtatttcttttctgagtatggtaaacaaggaaaactataactacactaactagtcttcaattccctcagagacccgagaaggaaataatactaagcaggaagtgagagcaagtgacttccacaaaaatgtgagaaatgaaaaaaatatgtggctgcctgaacagtcacccaaggttcctctgcaacattggggcatccatcttcagccaataggtctagcatatctgacaaacatttctgtgaagtaggattttctgaagaactgtcccaccttgtcttggtaaggttttgcaatcactctattttgtgtcctgtatgtccaatttggacagcatacggtcatcagtcaaggcaagggaacttccttgccctttgatacaaagaaagcaaactccatgtggagtttctttgatgcccatcatcttctctgaagtagattggtgttcccaggagcagacatgtcttattgtcattaaaaattctgttattaaaacattttaaatgccatattctgtagatttctgaaatgtttcaagatgacctgtctatctaaaatatatctctgtttgaccttgaagacattgtctaatatgactacaagtttggttgtaatagctgactaattgctaatctacattatcttattatcctatatagttgataataataactttcaaagactagaaattttcattacattgttaaatgagctatataggtacaatatcttgaacaatattagaaatgtatgtacagtgtgttttaaccaattaatttcaaatttgtatcaatatacagtatttgtacacaatatacaaaagtccaatccaatataaaattagttgttgctttttagaagtagattcaataatctacctttctgtcttatatatgtatcctcccatttttttcaaaacaagagccctgaatctaatctcctttgttttgctttttgtcctaaccattaccagtaacaacttgtaaccaattcccttaaacaatgacagatatccataatctattgaatgaccaaaaaccagccaccccaccttttgggaatatgggcatcatgttcttaaatttacttcttgctgtctgggggcaacggcatctttaggggatactgaaaagaaaaattgggttaactgtcaagctgtatcatttgttgttcagtccctgtgtgatgggaaagtgcagggctagtctcaagtcctggctaaagtagtgtgtgatgctggatcacctcacctggccaccttgaaattgttctgagcagtgtctgtgaggctggatcatctcagcaggtaacctcaaaattgttctgagcagcttttagtccaaatccaatttttagttggagttgttcagcttaatggtgttatcatagttctggtgggattgtcattgtggggctccatcctcctttgggagatttcaaaggttgcagttaggcatggtcatggttcactgtagaaaactgctagagactcaaacctgaaatcatgtacaggaaggtacatgaagccttttttttttctaaaattggttagtactctatacaannnnnnnnnnnnnnnnnnnnnnnnnnnnnnnnnnnnnnnnnnnnnnnnnnnnnnnnnnnnnnnnnnnnnnnnnnnnnnnnnnnnnnnnnnnnnnnnnnnnnnnnnnnnnnnnntatgtgtttccacatggtcttatcttacccgagaagggtctggacctgctactcctttgtgctctacattgcgactctttttggtgggctccttttgcctagctttcccagaattctcctcatcttctgttcccacctattttcctgcctcattggccagtgttttattcatcaaccagtaagagaaacatatacagaaggacagcccccatcaaatagtcccttaatttttgtttttcttctgttccatatcaggtggctcttctgacatgagacagattttttattttactttaacaagcaaacttgggttttgagaaggagagagccacactccaactccaaagccagctttaatctttaattggactgggactacaaaaagatcatttacattatatgtctgtagaaaaaaacagaaacaaacatttgggaagatttataaaattttattctattggaaatgtgataaaccagtaggccaatttattatttttcttggggcaattttttctggatgatttgtccgtttttttttttcagatgtctcatttatccagtgatccccagattctttagccggatacctttattctcatgaaaagacaaaaataaagcccttccccaaccctaaatttttgaggaggttctcctttggcaagttatatctgatcaaatgaaaagcatttattaattttatagcttagtttagattaaatggccatgctgcttgatgaactatcgtctcttctaattaagaagtgccttgttcagatcaaatctttatcaattttgatggtatccatagattttcttcacctgtggaaacaaaagcaaaacttcttccccaatgtaacacatgtcccggtttcctttcagatgtcaacacatttttgaagtataccggctgatttaattccattattttttctgttagccaatgtctttctgcatctgttgttccttttctcataagcattcagaaaattcaaagttaataaagcactatgtgatctgtttctgggggggggtctttatcatccctttctgtttatttagcatatcctttagagttggatttggtcttttctgtaactgtttgcccggtaggatatacctgtaatatgctttatattataacgagaaaaaaactgtttaattttcttagagatatatactggagcattatctgtcttcatttttgtaggtatacccatgatggccataatttccagcaattaccaaatcagccttttccaaactcaaattcagttgcccattgaaaacctgaataggtatcaatgttttggtgtacatattttaattttccaaattctataaaatggaacacatccatctgccagatttttattcatttgaataccctttgggttacttcctgctgtagtggagtttggttgtataaagaacaagcagaacatttccttataattttcttgacttgttgccaagtgatggaaaagtcttttttcaaatctttgttattgacatggtgtttttaatgaaattctgaggcctttagcacatttcctatcaacagttgatcaatttgatcatcaccttgtgctaaagggcgtgactcccatgggattggatgtgtgacatatgatatatatggatgattcctgttcctgattaaataataatgtcagttctgtattgtctggtataaattcagcagtttcaatatgcaaaaacaactctttctgcatattgtgaatcagtaactatgttgagaggttctttatgatccattaacaccatgagaatagatataattcttacttttggacagaattataaggacttagatccactttacttaaattttctgatttataagctgcctttccttatttatttgcattagcacagaatgtaggagctccagttattggtgttttccgtacaatgcaaggaaggatccagtcagttctctttataagttgaattttcttgcttttgggatatttgttgttaatctcttccaaaaaattaacaacatcgattttcccaggttcactttctactcataatttatcaatttcatcattagtaaaatgtactataatttctgctgggttgattcttgctagttgatgaagtctcaattttccttttcgaatcaactactcagagatcttttccacctaagtttttaactttttgctcagtttatgtggtaaaaagatccattctatgataatatcttccctctacattaaaactcctataggggaatgcttagagggtaatatgactacaatgcagttaagcttcaggtctacacatccacatgtgcaatctgtaatttctcttccaccaaagccaattttctctcagcttcagctgttaagtccttgtcaacatctaaagttttgtttaaattaaccagttaatcagattttatcctaataatgtgccacagatgggaaatgtctctttgcaatctttgaaagccattaagagactgcaaatgatctttcctaatttgcaccttttggggttaatttttttgtaaacttattttatagcctaaataattaatagaatctcccctttgcatttttcatgtgcaatttatgatccacaacaaggcaaatttttctttacttcttgaaacattcttttaaattatctacatttgaataagataaaatgtcatccatgtaatggtatactatagattgaagaaattacttatgtattatttccaaaggctgccacacaaaatattggcacagggtggggctatttaacattccctgtgggagagccttccactgttatcttttagtggactgagaattattgtaagtaggcagtgtgaaggcgagtttttctcagtacttttcttgtaatggtatactaaagaaacgatcttttaaatgaataactatgagaggccatcctttaggcaatagagaaggcaaaggaattccagactgtagagagcctgtttgccgtattaccttattaacaggtcttaaatctgttaccattctccattttccagatttctttttaataacaaataaaagagaattccaagggttggttggttcctcaatatgctgagcatttagttgctcctgtatcacctcttctaaagactgcagtttctctgttgttaaaggcattgcacaactcaaacaggtttgtctgttagtcattataaaggtagggctgttggtgcctatggaagattagcagctgttgcgtcctattcttgcacaacctgaatggttggtgattgttcttaataataccttcctataaaatttccagaaccatacatttatttatggcttgtttctatgattgggggaatgtttatctgaggatttccttgctgtaacaaattacatccccacaaattcattgcagtattcctctctgtccttctggccctatacatttgcgtcatcttgctcttgctctttgttttacttgagataaagttccaatccctaaaagttgaacatttaccttctgaagaggccaatttggatgacaagattcttttgatataattattatgtctgcacctgtgtctaccagaccttcaatgatacacatcatttattcatacttttaatttttgtctctgctcatttatagaagtttgctagtatacttactttgtgatttttttctgactcttttgttctctcttctgtagctcttctatcatccagggtggtgtaatttcttacaataggtattaggctctttaattgctctgggaaggagtttccacagtgataggaaaagactgagtcaaacttggtatatgtaacatgagttctaataaaagtctggagtcagataaagggagaaatgctgagagatcagagagaaggcaagccaaagccaacttttcctcattagcttcccagcagaaaagagagtgagttcctgtttcctcctgcctatattcctctttccgcccagccatctcacttcctgtctgcctgtacagacctccttacctcttatggttagctagagtcaaactccaccctctgatcttcagacaagctttatttgtacaaataatatatcaccacataatctacaaattaaccactaggctgagtgtagccaagtttcaggacatatattttatggggagttgatgtcaacctacaaatgccagttgtcaggcacttttcctggataggtggagaagctataaaatctatgctttgtttctgggttatttgttacataaacaaagtttttttggggggagaatattagcagtgctaaggattttggaaacctacctggtgagtaaagactcattttcagtagtgaaattcactaggttatatcaacaacattcaaagaaatcttactgatagctcataaactaaccgtttttttcaatctttttttttgttttgtttttgtttttcaagacagggtttctctgtattgctttggaggctgtcctggaacttgctctgtagatcaggctggcctcaaactcacagagatctgcctgcttctgcctcccaagtgctggcattaaaggtgtgtgtcatcaccactgagctgaatgaaatgatttttaagtgtgcaataattatattaaattgcatcacatatgtgcctattctacaatgcttaaaaattgtttcttatgtataagccaaggttgattgtgaatgcctgagatcccagaattctggaggtagagacaaagataagaagctggggattttgaggccagactaagctatgagaccctgtctcaaaaaagaaaacaaattgactagaaagagtcaaaattcactttaggtgaaaaaatacttagtaagaactgcaatgataatcttgcaaaaagtttgcattgtattattgtaatacttatgtggtgatatattatttatgatttaataaagccactggagatcaaaatgcaaagctagccacagccatagagccaggcagtgatggtgttacacacctttaatctcaggacgcaggagagaaacaggagacaaaagtagatggatattgttagttcaaggccaccctgagctacaagaaattgatacagtccaaaagagaaacagctcacacaaatgtgatcccagtacttggagtgacacacctttaccccagcactaagtaggtggagacagtaataatatggctgggtgcagagaagaatataaggccggaggagacaggaaccctagggattgcagtctgaggcttggtgaagagcagtgcagtctgcattgcactctgaggattcaaggagacagggtcacccattttggtctgaggtagaggtaagagctagttgctggctgctttgcttctttgatcttcatcttgaaccccaatatctgtctcggtttttattactcgtgttatacttaaaaattatatttattgtgtgtgtgtgtgtttgtaatatatgcacatgtgcaagctgtccccaaggtcagaggacaacttttaggagttggttccctcctgtcactttgtgggattaaatcaaggtcatcatgcttccatgtgagtgctttaattttttttcattttgtgtgtataggtgatttgcctgcctgtatgtctgtgtaccgcataaatgaagtgaccacagaggccagaagagggcattagatgacttgggcctgggcataaaaacagtttgagcgcatatgggtgcttcgggtcaaactgaggtctgccggaagaaaaaccagtgctctcaaccacctagccacctctacagtcccaataaaaataaatcttaaagctgggctatggtggtacacaccttgcagaggcaggctgatctctatgagtttgaggccagcctggtccacagagcaagtctcaggactgccagggttacataatgacacaaaaaagtattctttgacaatttcatacatgtttacaatgtatatattttgaatatatccatcccctattgtcctttcttatcctctattcaaccccttcttcttaacaattacatctccattttcatgtctttcattagtgcctcactgaatttaattagggttgcttgcatgatcatggatgtggggttatttacagaattatgagcaacttaacagtggttacactactgaagaaaaacaactccatttccccagcagccataaactgccaatatctcctcagaagaggggcctcatgatattgctacacatttattatattgataaaattctaataccaaaagtttcccaaagtgagccccaaatgacagggtgcttgtgtttttaattttcctctatttctgtaattgtcttcttctactttctactaatgtagtttttcactgctgaggattgaatcaaggacctcacaacattaggtgaatactcttattttatacaacaaatacctctcctccaacacaaagaaaatcttgaggttgaaaatactcaaatacagattagaagcacagctttattttcttcagcaacatttgagcaccaaactaaacaagtggcccctaagtgcctgaggaccaagtcaggcaaaaaaatattaggccccacatttaagtagcaggtactatttctggaatgttttccagaaaattgtctgcttaggagggaaccgacataaggtcagatctgagccccttttcccaggcaggcttaacgagaaactgggggcccaaagcgctttatggtgttcaccactagggcgagctggtcaagaaagttcatgatggaaattcggaggaggcgagagtcttctgagatccagtgtctaagagtgaggaaaaagaatattaagtttaaaatagtaattcttatccttctttccttatttattttggaaagagagagaatctcacgatgtagccctggctggcctggaattcacagaaatctgtctgcctctgcctcctggctcctacctttctggatcttccctcaggctcccactgtaccatatcctgcaggtaaagactggtccactgcaccaagagtcttcttagaagtcaccctagtgtgctgtctctaaggaagtgcagtcttgggtagagaatagtccagccacctacccagcatgccagactctttcagcacttacacctccagcatgcagccgctgactttaaggtctttccccaagattcctcggtgcggttcggcatcaggagctagggacccacaggcgatttctgcctccaaagaggtcgggaaaggcactgtaagggcactggtagagactcaggaaaggcaccatgttgaatcgttttcgcctacttggccctctaaaaccatctcatctggtctaagctccccagactacatcttgcacattgcttgggcaattcctgttcattccctccaccctccggttcccctccccctgttatcttctcatgcccagacctnnnnnnnnnnnnnnnnnnnnnnnnnnnnnnnnnnnnnnnnnnnnnnnnnnnnnnnnnnnnnnnnnnnnnnnnnnnnnnnnnnnnnnnnnnnnnnnnnnnnnnnnnnnnnnnnnnnnnnnnnnnnnnnnnnnnnnnnnnnnnnnnnnnnnnnnnnnnnnnnnnnnnnnnnnnnnnnnnnnnnnnnnnnnnnnnnnnnnnnnnnnnnnnnnnnnnnnnnnnnnnnnnnnnnnnnnnnnnnnnnnnnnnnnnnnnnnnnnnnctggtcggggaatcggcgccatctgcagtgtggcctaaactgtgtgctgcttgcatgtctaccgctgctccaccctccaagccaccctccgccatcgctacggcccagagcccgccttatcctccggaagctccgccctcgctcaggctgccaatcccacatgcacctgcgggaatgggcgggcgacaaagttgctaaattgggtcggtccccatctggaggcctctgttgggatctctaagagattgatctagtctccctcagcctccaaagtgccataccacatccagctttcccttcagtttctttttaaaagggatctaaggagccgggcattggtggcagatgcctttagtcccagcactcgggatgcagagagagagagagatatccaggctgtcctgaaactcacagatacaagcctgccaagtgtgctgggattaaaggtgtgtgccaccaccatctggtttaagatttatttatttttattttatgtgtataaatgttttgcctgtttttacatgtgtgtagtgcctgttgtccatgtgggtactggaactggaattatgggtggttgtaaacttttatgtgagttctgggaacttaacccaggtcttttgcaaaagcagcaagttctcttaatcactaaactatctgtctagcctctctctctgcatcacaccttcaaaagctctgagattgatcttcttcttgtctacagcatatcccccacaaaagtttctaatttctttctttttctttttcttgatttttcgaaacatggcttctctgtgtattagccctggctgtccttgaactagctctgtataacaagctggctttgaacttcacctcctggcaaatttaagatatcttttacttattctttgacaatttcatacatgtgtacaatgttccttgatcctacccatgcccaactcactcttctcactctgtctaatttctagtatagattaaatcaatgcttaaaaccctgtatattgggctgggcgttggtggtgcactccttcaatcccagcactcgggaggcagaggcaggcggatttctgtgagtttgagaccagcctgatctacaagagctagttccaggactgccttcaaagccacagagaaaccctgcctctaaaaacaaaaaacaaaaaataaccaaaaaaccctcaaaaaacacagacacacatacagaccaaacactcatacacataaacatttttaaaactcttaaaataaaaaaggtcatggtggattggatagaatttatttggtacaccatttatgtggcatttcaaggttctggtttcattcccattatcacaatcaaccaaccaacaatccctgaaacgttttctagtggcacttggaataaaaaccaaagctttgcagtagtttataagatccctgtatgatgtggctccagttccccccttttttttgcccctatgccaccacattctgtgtggttactggggccttctctctctctctctctctctctctctctctctctctcgctctcgctcttttaaagattttatttattatgtatatttattagggcaccagatttcattacagatggttgtgagccaccatgtggttgctgggaattgaactcgggacctctggaagaacagtcagtgctcttaaccgctgagccatctttccagccctctttttttttaagaaaaaattatctacttatttttattacatatacagtgttctgtctgcatgtttgcctatacaccagaagagggcagcagatcacataatagatggttgtgagccaccatgttgttgctgggaattgaactcaggacctctggaatagcagtcagtgctcttaacctctgagccatctctccagcactcactagggccttctctctactcctgagcctacccctcagcactttgtgcttgcctcttctattagtaagaatattcctaaactttcttatggcttgtttatcaacattagatttcacttccaacgttaccttctaaaaactagacacagaaatgctggcactaacagacattataagtggacataacagatatctatagaaaatctacccaaacacaaatgaattcaccttcttctctgcacgtcatggaactttctccaaagttgaccacatactcagtcacaaagtaaatctcaatagatacaagaaaattgaaataaccccttttagcttatcagatgaccatgggttaaagtggatatcatcaacaacagaaacaatagaaaccctacaaactcatagaaattgaataactctctacagaatgaaaaatgggtcagtgcagaaattaagaaagaaattaaagactttctagaattcaatgataatgaatatacaacatacccaaacttattggaaacaatgaaagtgtggtaaaagcaaagttcatagcaccaagtgcctacataaaaaaattgagatctcatgctcgcaacttaatagcacatctgaaagttctagaacaaaaagaagaaatcctacccaaaacgagtagaaggcaagaaataaactcagggctgaaattaataaaatagaaacaaaaaaaggagcagcatcagaggtaggttcgagctacaggcactgagcagtgccagtgagaggcccaaatcccagcccagaagcagcgtcagaggaagtcccgagcttcaggcctggagcagtgtcaagggaaccaagagcctcagaaccgggagcagcatcagagcccagaagctgcatcagtgagaggcccgagcttcaggcccaggcctggagcagcatcaagggagccatgaacctcagaactaggagcagtgtcagagggagacctcactctcagtcacagaagggaggagtgatcaccgggtgaagcaacagcagcactttccagcagtagcttccagaaaccattatcaaaagttcctctgggggggggggctggagagatggctcagaggttaagagcgctgactgctcttccagaggtcctgagttcaattcccagcaaccacatggtggctcacaaccatccgttatgagatctggtgccctcttctggtgtgcagatatacatggaagcagaatgttgtacacataataaataaaatcttttttttaaaatgttcctctgggaaaaagcacctgtgtcccagccagcatccactgccatttctcggtgggagatacccagctattacatcgactcagccccatggaaggagcatccaccagacctgtagccccacctgcacctcaagtgagcattgggcccacttccaccaggaggagagttcaccattagctctgctctacttgtgcctgaaggagtgatcaagggagccacagcccccaactataccaattagagaaagagagaaccctgaagcacaagctccacatataccgattagaggaagagatgtttagacaacaaggtatgaacacactgaacaatataaagagcaataaggcaccactagaaactagtggtgctatagcagcaagacctgaacatcccaacacagatgaaggagaagaaaacaacctaaaaaataactttatgaggatgattgaggcctttaaagaggaaatgaaaaattctcttagagaaatggaggaaagacaaatgaaatattggaagatatcaacaaatgccttaaagaaaatcaagaaaaagcaatcaaacaagtgacagaaatgattcaagacttgaaatctgaaatacaggcaataaagaaaacacaaatagaaggaattctggaaatggaaaatctgggtaaatgatcagaaaccacaaatgcaagcataaacaacagaatgcaagagatggaagagagaatttcagtcactgaagatatgatagaggaaatagattcactgatcaaagaaaaatttaaatccaacagatccttaacacaaaacatgcaggaaatctgggacactgtgaaaagaccgaacctaagaataatagggatagaagaaggacaagaagtagaactcaaaggcacagaaaatatattcaacaaaatcatagaagaaaactttcccagcctaaagaaagacatacctatgaaaatacaagaagcttacagaacaccaaatagactggaccacaaaaaagttccctcatcacataataatcaaaaaataataatacaaaaaatcaatgaaacaaagaattggttcttttataaaatgaataagatagacaaacccttatcaaattaactaaaaggcagaaaaagactatccaaattaacaaaattagaaatgaaaagggggacataacaacagatactaatgaaatccagagaatcataaggacataatttaaaaatatgtactacatcaaattggaaaatctaaaagaaatggataaatttttctataggaaccacttactgtattgtgggatattcaccagagaagattgctcagacatggggttaagacaatagaaaatctttattagttggttggcatctacactgggtgtttcggatctcagtgtagccccaagattttctcaggatgaggttttaagaccaaaaaaatgttctgggttgacatacttcagttaataagaacagttagccagaagcagaactgcagaaactaaaaagcaaggttaatacatgttgacactttatctgaattatatggactttgatgtattaattgggccttagctttagttttggcaggtggtgctgtctacattctgagttttacagcctgaatagtacttccatcatgaaagttagttgtcctaaggtctcagggcctattaaggtctggggacctgttacattaccaaagttaaatcaagatcagataagcaatttaaacatacctataacctttagtgaaatagaaatagtaattagaaggctcccaattaaaaaaaaaaagcccagggccagacagttttagtgcagaattctagcagactttcaaagaagagttaactccaatattcctcaaatcattccacaaaatagaaacaaagaacactgctcaattcattttatgagaccacagttactctgatatccaaacaacataaagacccaacaaataaagagaattacagactgatttcttttatgaacatacatgcaaaaatactcaataaaacacttacaaactgaatgcaaggagttgcataaaaaagatcatccaccatgatcccgtaggcttcatctgagagatgcatggatgattcaacatatgtaaatatgtccatataatgcaccatataaacaaactgaaagagaatacctcacatgatcatctcattggatgcaaaaaaaaggcctttgacaaaatccaacacccctttatgttaaaagtcctgaaaagattagggatacaaagaacatacctcaaaataataaaatcaatataaaacaagccaacagccaacatcaaaataaatagaaactcaaagcaattccactaaaatcaggaagaaaacaatgctgtccactttcttcatacctattcttttgctgttgttgctgtctttgaagaaaaactgaaggagctatcaaaagatggcaaggttcccatgctcatggatctgtaggattaacacagtaaaaatggcaatcctgccaaaagctatctatagattcaatgcaattcccatcaaaattccaacacagggccaggcagtggtggtgctggtctttaatcccagcacttggaggcagaggcagatgaatctctgtgagtttgaggcttctctggtctacagagccaggactgttacacatataaaccttgtctcaaaaaatttccactgcaattcttcacagatcttgaaaggaaaattcttaactttatatggaaacacacacacacacacacacacacacacacacacacacacacacactaacaataaaaaacaaaagaaaacaaaaatcaggacaggcaaaacaatcctgaacaataaaaaaacttctggaggtctcactattcctggtttcaagtcgtaatacaaaatgatagtaataaaaccagcatggtattggcataaaaataagcacattggtcaatggaatagaattgaagacctatacataaatccacacctgttttttgataaagaaatctgaaatacacactggaaaaatacagcattttctataaatgctgcgggtcaaactggatgtctgcatgtagaagaatgcaaacagatccatacttgccaacctggacaaactcaattccaaatggatcacagacccccaacataaaaccaagtaccctgaacctgatagaggagaaagcagggaatagccttgaactcattggcacaggagaagactttctgaatagaacaccaatctcacagacactaagatccacagttaataatgagacatcatgaaactgaaaagcttctgtaaggcaaaagacactatcattcggacaaaacagcagcttacagactggaaaaagatatttaccaactccacattcaatagaggactaatatccaaaatatataaagaattcaagaaacttgatatcaaaaaatcaaataatccaattaaaaatggagtatagatctgaacagagaattctcaatagaggaaacttgaatggctgagaaacacttaaatgttcaacatctttagccttcaaggaaatgcaaatcaaaactacattgagattctatcttacacctgtcagaacggctaagatagaaaatacaagtgacagctcatgctgaaaaggatgtggagtaaggggaaaactcctctattgctggtgggactgcaaatttacacagccactatgagaatcagtatggtggttcctcagaaagatgagaattgatctacttcaagatccagctatacccctcttgggcatatacccaaattatgcttcatcctaccacaatgacacctgcttaacaatgtttattgctgttctagcagagtcattgtatctagggtaaacattagaatgagataattgttttctggaagtacttagaccttgaagaaatcatcatggaaaacagtgattgttttctattatctatagagttgtttttatgaaggagctttacaacctttgcatgactttaggtacagtatggtcctgtcaaacttggaatgccatgcattattgagtactgcaaatagtggacaataaagactaaagttgcagggatgtgatgttttccttcacaaaacatatagattatatcaggagctttggtatgaggaacttgttttacccaaaaaacaacttttgtgtaacgaccaataaatatgcttctgcactgttgtttggggttcaagtccatcagagactgttcctccctgctgcctcagaatctgattatattctagagtgatgctctttctttgattatccctcacaactaagaataccaacaatagaacccatacccaacactgcttgggtaatcaagaaccagagactagatagcccagacctaaggtaaaaccgaatgctacttactgctctaaaacaagtggtgataaaatgactcctaatgatattctgctatattcatagatcagtgccttattcagttataatcagagaaacttcttcctgcagtagatgggaacaagtacagagacctacagcaagacattacacagaaagagggggagggaaggagagagagagagacagagacagagacagagacagagagagacagagagacagagagagagacagagagagagacagagagagacagagagagagagagagacagagagagagagagagagagagagagagagagagagagagagaccttggaacacacaactctaaatgggatgaatgggatgtctcaatcaaatttctctccgcagagctcagggaaccctgaggaagaagaagtggaaagagtctaagaaccagaggaaaccaagaaaacaagaccctctaaatcaactgagcaaagctcatatgaactcagagactgaagcagcaattacagggcctacgttggtctgcaccaagtcctctctgtttgtatattatagctttcagtttagtatttttatgggacttgtatgttaacaagtgggtctctgatttttatgccttctcttggggctcttttcattatgttggtttgctttgtccaactttgatgcgatggcttttgttttattttttgtgggggctcaaggcaggggttctctgtggctttggaggctgtcctgttgttttatcttattatattttattttgttatgtttttttgttttctcttagaaacctgttcttttctaatgaaatacagaaagggagtagatccggatgggtggagaggtgtggaggaactgggaagagcagatggaaactataatcaagatatattgtatgagaaaagaatttattttcaataaaagggaaaaattaaaaataaataagtttaaaaaatgaagatactatgatgaaatcaattactttgtagggtaatgcaaaatattacttaattttattttttgttttgtttttgagacagagtctgtctatatagccctagctgtcctggaactatgtagaccaaactggcctcaaactcaagagagactcctgtctctgcctcctgagtgctgggattaaaggcatgcaccaccatacatggcttttaactttaattttaaaatgggagaaaaagttgtgaatatatttcattgattgaattctttgctagaatgtacaaagctctgaggtcaatccctattaccacccaaaatactcaaaataagcagacaaatcaaaactgggtattgtactatatgcctgggatccaagtacttgtgaggctgaaacaggaggactgccatgagtttgaggccagcttggagaacagagagtgcttggtagtcttcctgactcatgaaacaaggaagtaaaagacaaaaaagaaaaagaaaaaaagaggagtgggaattgaatacacataattactgtgataaaattttcaggaaggctaaaccagaaaccacttaaaatacttttctgtaggagattaagatagctgctctccaagcttgtgcagcaaatgcttttacctgctgagccacctcactgtccgttttccatttttttaaaaataactttttttttttgtaaagagtctcactgttggtcaagttggtctctatgtcctgagctgaggtgaaccttccaccttagtcacttgattagctgggactacaggaatgcaccacaacgtccagctaatttggtgctctttaagtacagctctattatcatactctcttgtgggatatattctaaatacaaagataactggctttctttctttctttctttctttctttctttctttctttctttttttttgtttttttcgagacagggtttctctgtggatttggaggctgtcctggaagtagctcttgtagaccaggctggtctcaaactcacagagatccgcctgcctctgcctcctgagtgctgggattaaaggcatgcgccaccaatgcccaactccaataactggctttcttattagcatatttaatgtggataatggtctggatgaggtgagtgtgaaactattttgggtatatgtttagatagactttatctggtagaacaaatgagtaaatatatcgatgctgtcagaaactagaattttcactgtagaatgagagaaggtgtgaaagaactgtgacacgagattatggctgaaagattcagcatgaacttgtgaattcttgatatatatggatatatatttctaaggtttgtttattaaggggtctggaaatagtgacacttcactcatagtgagcacatcctttacacagatcttggtttctaaataccattctcccgtaaaaggctgatccttagtcaagggcaagaaagtatacaaggtgggcctagagtatactgtggtgctagaacaaagttgtaacagggaagaggcatgagggaatgtctcaaactttcatggctcttttccaaaaggttcagttggatgaaggatgttcaaactattctaaatgtagttgtttgggggctgttcttgtgttactttgccatgtacatgtagacatggaagaaatcacaagttcatatccaaaaccctctcattaattcatctatcccttgtgaatatccaactcaatgagcctcaccataaatgctgagctcctgaatctgccctcctgttggcccaccaaacatctcatcccagctcccacaacatttctgtgtttgggaggccacctgagctggacccttcatttctgctgctatttcctggtgtgattgtgatcacatcacatacctaggaccaaggccccaatctgagagtcaggaagcggctgtcaggaacttatattgggtagggagcagtgagtggatctcagcagggcacagtgcctatggcaaatgttccaatccctgatgaggatccttagattttagtctgttggtgtatggaaagttataccaaattcagggcaaaagcaggatctgcatcttgtggtcactctattttcaatgagttcccagcctcttatgtcccccttcctatttttcatcccagcagcatttgtcacctcttgtcttccctcctcttctctgccactcttgccctgacagaactccccaaggcttaatattgaatgaataaagaaactaaaagaaaaggaaatgagcatgaatgctcctaggcatggtggaggagaaagtttattatagatatgtgagagagcatagccagaggcagggacatctgggaagagtcctgagtgaacatatccctgaaccctgtgaaaagagtggtgagggaaaggtaggagaaccaggggcagtagctaggaggctcaaatgtacaaagagagtgagtagccaaaatggttggattatagagagaagagcagcccagtcccctgggctggagagttcaggatagggggccaagtatgccagccaggatggcctgtaaaaagtaggtactgagggatgctagagaatccggaggccaagtctgctttgatgttaaataggcatctcagccatttgtcccaggtttgaaacctatttgcctccattccttcgtacacacatcttgtggagtaacagattcttgaggattctttggctatatattaagaactccagagagagggtccaccatcttcctgtagtggcagcactgatggtctctcccttctgcaaacttgcccttgacttgcacttgacaccacctattgcccatgcctttgcctgtggctcccttctaaactcccctctggttagtgaagctggctccttgaggctgagatctctcctttttgttagcccccttctctgggcagctacctcaatcatccttccagtatctaggactctgtctacagaacattcctgggtatagcagtatggattcaagttgttcctcatccacttcttacatttggcagtcagatgagaatgaaatgagaaaagtgctctgcaaagaaaaggttcattaacaatacaagagctgactatcaaaaggagtccccttcttgcttttctggatcagcttttccattacagggccctcaattcatattttgagggcacttcactcatctccatgtccaatctcacctcccctgtcccttacctcccacatacagttaccccagcatcccaaggcaatcagatatcattggatccctttcgcaactccttcctacacttgtgagttttgtttcagccatagcccaattcctgaagaaccctttatttagtttcttgctctataggtagctgcactgcaatacataccaattgtcccataaactcgtctaaacactgtcctttctttggccaaggtgaggatcttgcaggctttgtacaccctgaattgagaagcattggctcaagagactcatgaacatgtctatggtttgtttcctctgcatttagaaactttaaatgcatttggatgcaagtctcagaaaacactccttgtctgagccctcatccctttctcctttactatctccaaggggtcatactctttctggctcagatgtttcctgtagtggagagttgccatatgcatccaccaggacatgcatttacttttccttcttggtacagctcctatgtgcccaggaaagcagatcaagactacctgagtaggtgttaactgataaccaacaaatcctttttccatatgccaagccccagtgattacacaggattcagttctgaccaataagagagcatttatttgctggggcatctgagacagaagctatgttacagagagaaagtgctccttgctggcagcaaatggtttgatgaagctgcaggcagccaccctttgatccttggaagtagtggtgaggatgaagcagatgctggagaattcagagggaggcaggaaaaaagctggatgtttggtgaaattgttcatcaactgccagtactcctgggctttttcacttttgtaagccagtaagtttcctgtgttgttaaaccaattatttgaaaccaaaagcagactagtttattaatagagttcgtcttggtaaaaagtctcacatgcaccttaagtgttatttaattttccaaatacattccctgactcaaagtgaacaaggacattggtaagcttattatctgagctgccagtccacatatgtgctcacaagcaggtccctgatgtggtaccccaggtctcagggaggagcagggtctaccagctgctcatcccctcaggcctcactttagtttatcattccattatggggagtcaagatttgtcccacaaggcccaaagcccatgcaggaggccgttgggcaagaaaggccagtgtagtcccaacaacattcagagttgcttccttggcaagagtggaggggcaggagtaatgtcctgcaggtggctatcttccagcctcaactgctcccagggggtcctcctcaaaggagctagtacttacatgacctttagcacccaggcataggttcagtgaaaagaagaaccactgtcttcagcttacatttctatctcctcctcagcaccctgagtttcttcttaagcaatgaaggtgtgcaaactgaaagtccctgtacacaggtggcagaggaagcatccgtctcatgctgtgggagaacgctgggtgaggagacccaggaagaatcctagttgtgacactgctttgtggagtcacctgctgtccctcatggatgagaccgacttccaggaggagccaagcagatagggtccccccaagaagagctatgtcacaaaggcccaggatattccatctgtggcccatgcttggctaccacttcacttttggcttcagtttgcttactgaacacaagatggcactgcagttggtgatagcagactcccaccttgagccgggaaagagggaaggaaacttattcaggtcagaggagtggtcaccactaacagactcaatggtaggggacctaagtggcacagaaacttgacttaagccatacaacggagctagggtatctttctgatcctccagcccctgactttgtcattcatcaagagcacactggctgcagcagcagagggactctggatggctaccacttggcttcctatggagatttgccaagggtatgccagacatactagaggacaggtgacagggactagtggcttcctgagggagtcacttgagtgtgtatgttgagtgggctaaatgggaatgttaaggcccatccctcaaaacaacacactctttctcctacagaggcacttctacagctggctagacttggattctggctgtcccaagccattgctaggtgtttctacagtgcagcctcaactgtcctgtggaaggcagaagagaattcaggccaagtactttgagtagtgcttagcacctagcaagaactgggtacataccagctattattatcactatgagccaaactgcgacatgagaacacatttaatgcaacatgcagctgtggcctgacctgggatttctccccccactcccagaaatgctatttggagaaccctttttccatagactcagttacttcagggtgtagaaagcggctggccaaacgttcaatgtcatccagtgttaggcggctcagagatctgtcataatcctgagaagagaagaccaggtgggttcagggggtgcaagcaggaaggggtatgctgtaataggtgggggctggggctagaaacattaagattggaggtccagaattattctgctcaccctctgtagttgttccaggaccctgctggtatctgctacactgaagtgacgggccaggactttggagatcagctgccagaggggtgggggtggggagtcgaccagtctgtgggcagacccttcttccagcagcaccttctccaaaggtttaacgactaggttgagtttagaattgggcccaatgttgtaatctgacagtcgtttctcatctgccaaagagagattggtggggttccttcctcattgttgtgggggtggccagagagcaatcctgccatggacagctagagtgaaacactgcagcatctggctatggggtggtggcgtctcagctacttttccaaggtttagtggcagccactgctctaatccattacactggcctgtacatcccgtcccccaacttccaacttcctacttcctgtggggggtccctggatggctcctttccctggttacctgttagggccttgcccttgaacagcagacgttgctggcgcacagggacgttcagcttatccgagaccagatgcttcagtgtagacactagctcgtcctccggcacctgatccggccgaggtggagaggcaagggcttagtccgaattccctgggcgatgcagccctagnnnnnnnnnnnnnnnnnnnnnnnnnnnnnnnnnnnnnnnnnnnnnnnnnnnnnnnnnnnnnnnnnnnnnnnnnnnnnnnnnnnnnnnnnnnnnnnnnnnnnnnnnnnnnnnnnnnnnnnnnnnnnnnnnnnnnnnnnnnnnnnnnnnnnnnnnnnnnnnnnnnnnnnnnnnnnnnnnnnnnnnnnnnnnnnnnnnnnnnnnnnnnnnnnnnnnnnnnnnnnnnnnnnnnnnnnnnnnnnnnnnnnnnnnnnnnnnnnnnnnnnnnnnnnnnnnnnnnnnnnnnnnnnnnnnnnnnnnnnnnnnnnnnnnnnnnnnnnnnnnnnnnnnnnnnnnnnnnnnnnnnnnnnnnnnnnnnnnnnnnnnnnnnnnnnnnnnnnnnnnnnnnnnnnnnnnnnnnnnnnnnnnnnnnnnnnnnnnnnnnnnnnnnnnnnnnnnnnnnnnnnnntgacctgttaattcctaccctgctggtggaccacatcagggcaaacatgtagtagtgtctctcagatacagaaatggtccagtcctacctgccatagcccaatggctttctacttcttcctttctagtctggttgcaaaaatatcctggccgaggctccaaagtagtggacctaggcctctatctcttcactcattatagaacagagtcctgccctgttctgatagagaaaagcctttgcagatctggagatatagctcaaaggtacaacacttgtctaccatgtgcaaagcacagaggaaggagagagtgggctctgtgcacggtcaccaagcctgttcaccatcctggtccatatcaacccagacacactcttcctatccccatccatacactccaagggacaaagactggaagggacccaagcttgcttttgtcttttattgaaatatatttctaactcagcatggcctctttggcactgaaagctggaaaaaaaaagcctggatttgtctgagtgcatagtgcatgagaacaaaaggcctttggtacagaactgtggggacagtggatggagtatgggggctggggttataaaacttgatccagggtcctcatggaacaggaaacaagttgctgtagatgaactggccaataaccaaagccagcatctcggaggtaccactcagtgccacaatgaagggggcctgagaggcatagtctgcttgaaggcgacgcagagacagctgcagcatagctaaagctagcaagctgttttgtacccctacctcaatgctgactgtccgccgctgggccactggcagcttcaggcacatggctaggctgtagcccaccaaaaggccaaccaggggcactgtgaagcccaccagtacgatgggtaacctgactcccactaagatgaagacccccatgtggtaggccaggaataggccacccaggagaagtacaaaactgaagggcttgatgacctgtagcagcagctctgagaacttagggagcttagacttgattaccacacctgctgctatggggatggcgatgaacagcagagtccccagtatcttggagatgggcacgtggagtgtttcatggatgctgagaaggcggctgtagatggctgatgaaagtggcaagaaacctgtggcagctactgttgagatgaaagtcatggagatggccagggtgacatctcctccaaggaggagactgaagaggtagctccccccaccgccaggtgatgagcaggtaatgatgaggccaagagctaaggccttaggtagcatgaagactttggccatcaggaaagcatagaagggcatgaccagaaactggcccaagaggcccaacagcatgggttgggggctctgtaggagctccttcaaaacttcaagttccactttgcacccaaatgaacatttgttgacaaagataagaggcaggagcaggtagaggattgggttctctgagaagtggcccaagttggggttgagggtagaagggatgtcttcagcaggtgacaccctgatgcagaaatctctccgttcttcaatcagcaaaggtggggtctcatggaggtccatgagctggaggtggagtggggccagcccagccagacctgagtggatgttcaccacgaagccacccccactgccccaggttatggcacttacattcttgatggtcagcacctctgtgtccagggatataaccctcagtgtagggctgaggcctgttccattggcctgtcccgagtactgactagagatcacaatgataccctcactcttttcagggaactcaaactctgtcactgaaccatccccaatgctcaaatagtgaccacctgtcagtggcacagtgtggccctgagcagtgctgaggttggcactggccatcacttgggccccccatggcaggcttatgagcagcaaggcagttccgagcataactatgagacctgtacaaccaccctgtcctcccaggccaggcaactgcttggagctacctttgcttctcctgaccaccatggcacccttcaaaggatagtgttcgtagggccctcgtgtcttaggggaacacccttgcttgtgctgttgtagtgtcctgagaagggtccatgggaaggtcctagtcctgtgtggtctttcttgatagcagggctttccctgaaaagagaaggggcaaagaaaatggctaatgaagaggagaaactgcaagctcaggagcacggggctctcaaagaaccttttacttctagtttggggatactgctggtccttgaatgtcattcagccatctcctcctccagcacagctgcctcaagcttctcagccctcaagagaggtcaccaacatatagaaaaccccactcagtctcccaattctctggacttgactactttggtaaccttactaagtagtagctagtactaagggctgtaggagagcgatctctaaccctgtcaccactagcccatttcacactagtttcaagatgctgtgacagcactgtaggaatgaactaaactgtttcctggaggggctatgtatcctggctcactgctgtcatcctagcacttgggaggtagaggcaagagaaacagcaatctaagatcatccttcagttacatagccagttccagggcagcctggaggatttgatactctgtttccaaacaaagcaaatcaaataaaaatggcttcctgggggaaacaaggacactagtcagataagaacaaagagtgctgatggtagctgggcatggtggtgtacacttttaatctcagcactcaggaaacagaggcaggcagatctctgtaagttcaaggccagcctggacgataaatgggtcccaggactacacagaaaaaaatgaagaaaaataggttgctgatgggaacattgtcttgtgccagatccaggtctttaaagaacagaatagaggagtctgaatgccatttgcctgctgcaaagtggtgataaagtgacatgggcaatatgtgacttactgaaccaaagtctgcagggcatggtgcctgctattgacatggaattgggtatatcattgctgtggcttcatgtcctgtcccacctgccctatactaatgagatgggagtccttgtgggaagcacatccctacttctaaaggaagttatagtgggagtgagttagttatccactgggcaagcttctcttgccagagctccccagtctcagaatttgagctctcatagctgttgctacatccaaaaatctctgctcaagagttttctggcatacattccccttccagaatcttttgtttgagacagtttctctgttatgtagtcctggttggcctgcaactcactatttagactaggctggccttaaactcacagagatctgcctgtctctgtctcttacatgctggaattagtatgttaccacattcagtgctaccagtctttttgttgttaagacagggcctaactgtatagtcttagctgggctgaattcagagatttacttgtttctgccttccaaatgcgaggataagtgtgagccacctaccagaattttaaacttatagtggaacctgagtatttctaagggtagagtaatttggggtgaaaggagggttctgcctccttccatttctcaactggatagtatcatcatctgctagaactggagcaactagatggccatggacaaagcaggttttacattatggctttccaggtacctttaagctatctggagcatgatcagtctttgaccctagacctaattcaatctatatggcctttgctgacttctgagtttgggtcacttaccctgagggccctggttcagccttgtgtctcaccgatgaagagggaagcaggaaaaccagagtagggtaacaagtcaagtggagatggaaagatgtaggcatcagagtggtgtggaccacttaagagagcggctaaaggccatccacccataacccatccttccagtaggactggtagacctgagtcactcactcactgcaaaaggatttggttcctatcctacacctttgctgatagaggggctgaagagttagggtaaatacactccaaggttaaggaagcaatcctgtctggaagctttttccacagcatcgaagtgttgggggttaggatatctggcagtgatgatcaggtctccttcgcacctggaaatcagaaggttgtcaagtggctggagaagttagaaacggctcacaaccctgcggtcagtcttgggttcaggagagccttcacatcactcccgcgcccgcaaggcctcatgctgggcctggcctgagcgggtaatcgcagactgcggacggannnnnnnnnnnnnnnnnnnnnnnnnnnnnnnnnnnnnnnnnnnnnnnnnnnnnnnnnnnnnnnnnnnnnncccgcccccacaggctccgccccacggaggccccacccgcgtactaggactccgccctctcactgaggccctcatctctgatcgggttcccccaggatgtgacgtttctgggagcgacgagctggccctaccacgtgagacctgacttcctgagtcagcgcttttggcgtactgagaaacaagtactttgttgtgtggttacctcctgggggaaaaagtgggtggtgggaaggtgtagaaaggatgccactcgacagtaaacaaatattgaattaaaggtgatgtgggggttgaagagatggctcggtggttaagaggtcttacaacttttgcagagatctcttgttcgatttcccatcagccattcagcaactaaaaacctcctgtaactacaattccagggggtttgatacccttcttttggcctctgcccatattggatgcatctgttgcacatacaaacatgcaggcaaacactcatgcacataaaataaaaataaatctttacaaagaaaggtgatttgtgtgcaggtggttctgttactgccatacatgcttctgtctttcaaacgcacaaaataattttgtttattttattattgtttgttttgtttacttttttttaaatgagacttttgctagttgtggtgcacacaggtggatctctgagttcgaggacagcctggactactgagtgagttccaggacagccagggctgttgacacagaaaaaccgtctcaaaagccaaactaataattataacaacaataatttgttaaatatgtatttatctggcagatggttgtgtgtgtgagagagagatggtttagtgattaagagcatatacacctggcatgtaactccagtttacaggggatctcatgctgtcatctggactttggaatcacttgcaatcatgtgcacataccaattcaaagtaaagttgagatcataaattttaaaatttattctcagttacatttatttaatgggtagtttcagactcagaaatctctcttcacagacatatttgatcttgcaaaacctttggtctctgagcttgtacataaagcttcattccattaataatatgatttttcccattgtagtgtgttctgaagttcttgtgaagaaaactgaacaaacttttcttagctgccatctgaggattttttttctgataaaagcaataagctaactgccacttgtattaagttctatagaattactgctggtgcagtcatatttagacaaaaaaacagacttaatttactttatttttcttgtataaaaaccattattgcagagaaaccctgtctcaaaacaacaacaaaacaaaaatccaacaacaaaaaacccagctggagcctgggttctctgaacagactgtggtgtgggctttcacaagattctcagtgaattcctgataaggagacttggtgaacacagtctctttccagagggtggcgtcaggtagctgtaggtcttggagatggcatcaaaggtggccttggcaaagttgcctagggtggcagtgtagcccctggctgatgtgtatcagtcatcaacactggcaatcatcagtagctacttgggcgcaggagcagagtcaatgccagtgtctctgggggcagggacgagacgcaccaacacagagccacagtggcctatcactttgcatggaacagtgtggggctttgacaatcttgttcccccagtagcttctctgcacagggacaatggatagctttgttaagatgatgtttcctcagatggcagtggctacctccttggagcatttgacaccaagaccaacataaccactgtaatccccaatattgaaacaaacctgaacctggtcctctggccagcccgaatctgcttttgcattggcatgatcttttagaacctcatccttagggatgtgcccaggaaaaagtcaataatcttggattacttaatggggtagagagagcagatctctctctctctctctctctctctctctctctctctctctcnnnnnnnnnnnnnnnnnnnnnnnnnnnnnnnnnnnnnnnnnnnnnnnnnnnnnnnnnnnnnnnnnnnnnnnnnnnnnnnnnnnccctagaactcatagaaatctgcctgcctctgcctcttgagtgctgggattaaaggcgtgctccaccaatgcctggctcagatttcttccagggacttgatcttcatatccttgaccaggaggcccagcttagtgatgtggattcactccttgtatagggctttaccttcacaagccccaacaatggccatggcctcaatcatgaccacagtgcctaagaacgctgccaaatactctggggaagctgctgtggcttcctaatcctgagtccccaggtattctgggccctctcacttcaccagcttcatccactgtttggtattttcccaaagaagcagcagctagactcatttatttgtttatgagacagaatctcagagctgacctcaaacttctaatgtagctgagagaatgaccttgaactttgaatccttctgcttgcatcatcacaacatcaaacccagtttatatgatgctgaggatcaaatgcagtgccttgttcatgttaggtaaggattacaactgatctatatccacacctctgaaaatgattgtaaaacaattttaaggtatatttaaaaatgtttttatctgtgtgtgtgcttgcatgagtttatgtgtaccatatatgcaggaaccattagaggtcagagggtgttgtatctcctggaatttgagttacaggtggttgtgagctgccacggggacactgggaactgaacccaggtcctctggaagagcagtaagcactcactatttctcttgccccatattgtatgttttataaaattcaaattagtacatacatatgacatgcaagtatgtatatatgttatggatatacatgctctaaggcagcagttctcaacctatgggttgcaacccctttgggggtcaaatggccctttcacagggttcacctaagacaggacgctcctgacttgcatacctcaacccctaccctgaactctgcagcccaggggagagttcactatataatccattcattttggttgccaattctatttgtacatttgggcctcctagctgctgcatctgattccttcccctttctcccatatctcttctccttccccatccccacatggcacagctcagtctggacatctggtctctcccagatgtcccagattctacctatgctctcccatgtatctacaataaactttttcctctaccatacttaggagcagtcatgttttccttttttcattcattcattcacctctctctctctctctgtctctctctgtctctctctctctctctctctctcacacacacacaataaaaagcaaacaaaattactcttttgaagtcctaatgacaggctgatgcttatcttcagagtatcagtaagcacaccactgtgtgtatacttggtatctcagaatgttggtactgtctgtctcaaatgggtttgagacatattgctagaagtcaatactgatagtcaggacatttgagagggctggttttctcacatgcttgggctgaagatccagtttggaaagtcaaaatgtgtctgtctgaagatgaggtaaattggccacagggagagataggtcagcagaaaaaacccagctttaaaaccaaaatcttgaatgaataagctgaaacttgcttgatctccatttggagccttataagtgtagctgaggcaatgttggctacattgtggaaacaagagaaaggtgtactggatttatattattctctattctttgagatttttgaaatttttcataatagaagattcaagagacaaatatatatttgataacatagttgtggatgtgcaattatataatttgtcaaaactcaaagatgtgggcctatgagatggctcagtaggtaaaggtacttgctgccaagcctaaggcctcaatttgattcctaggactcacatgatggaaaaaaagaaccaattcttgaatgttgtcctctgacttctgcacatgaccacacatatacacacaaaaataaatacacattaaaaagcatcaaagaatgtatagtacccagggcaaacctaatgtaaaaaaatataggttcactgattgtaaccaacaggagtctgatgggctgtttctgtaattttacctcagttttgctatgaacttaaaatggctcaaaagaaagaaagggacaatagtaatgtaattttcttttggcagtgctgaggatagaacataagactactgagcccccagaatattcttcaaatagtctggtacaggagctggagagtgttcagtctataactgtgcaaacatgaggacctgagtttgagccccacaacccacataaaacaaaaagacaggtgtggggaggcaggcataggtggatacctggagcttactggcagcctgccttgcttaattctgagttccaggccatttgaataaacaaacaaataaatagaagttgtggaatgtggtgatacatgcctttcatcccaggacttgggggacagaaacaagcagatctttgtgagtttcaggccatccagggccacatagtgcgacctttctcaaaacaacaaaacaagtaactaatactagtcctggtggaatctgctgtaaatgaggtttctcatcccatctgccagttctcaaaacaaaacaaaacaaaacaaacaaaccaaaaaccaaaaaccaaaaccaaaccaaaccaaaacaaaacaaaacaaaaaaccaaaaaaagccccctaaaaaacaaaaacctctaatgcttaattataattatctggctaagggctcaggcatattactaactagctctcacaattaaattaacccatttctattattctatattttaccatgaggcttgtggcttattacctcacatcttgcttccccagtggatacatggcatctacctgactctgtcttctttctctccataactctggattttctgcatggttctattctgcctagccattggccaaatcagctttatttatcaaccaataaaagcaacaaatatttgcagcatacagaaggacatcccacatcatctccccttttctaattaaaaagtaatgttttaattttaagatagtaacattacatataacaaaacagtcactaagcaagaattatagttataatatttagcctatttgcatttagcaaaataaaagaaaataccctatcatctatctttgtgagtctaaagttttatatctaattaatcttttatcacaactaaggaaaaactataactgtctttagaagtttatagtattacctcagtaaacttgaagtacattgtaagcaactttcaaaactttagaaatgacagagatatctggctgcctggacagtcacccaaagttctgtgacattggggcatccatcttcagcccataggccatagtatctggcagattttacagtgaagtaggaagatctgttatgccttgtactggcaaagttcatcaattggcttcttctgtgtactgtagaatgtctggcagttttctttgtgaagcaagaactctgaaggaccatcctgtcttgtttgggcaagttcaacagtcactttcttgttggtcctgcatgtccagtttatacaccatacagtcaagcattccaggtaagagcagtttcttgcacaaatgactatttctaccatgttgaaggcaaactccatgaagaccttcttcaatgcccatcattctcttgaagtaattggtgctgccagaagcagacatgcctcactgttgagaaaagtctaagttcttaaaacatttaaatgccatattctgtaggtctttgaagtgtttgaagattacctatccatctgaaatatatctctgcatatctagaaaacctaacatgactataagtttgactattatagatttgtatttctaaactatacaatacattttttttttggttgttcgagaccgggtttctctgtggctttggaggctgtcctggaattagctcttgtagaccaggctggcctcaaactcacagagatccacctgcctctgcctcgtgagtgttgggactaaaggtgtgctccaccaacgcccggcttatacattacatttttaaatgatttccataaacataataccttaaacaagagtagaaatacacacatactataacaaaattgaccttaaatttgtatagataaacgaaaatccataccaatgtcttcattcctatatcatatccccctcttttctttagaaagtgattgactatgagcactaattttttataatcaacttcctttaaaagaaaacaaacatttataaacaatatttggaaatttgggcatggctttgtagaccacttcctgctgattgttggacacagtaatcttatgggcaccctgagaaaatttatgattatggtcaagtcttggttggggtattttgtgtagttggtccatttcagccagcagtcctgaagctgtcattgatgttggatcacatgggatattatttcaggggggcttgtttgatcaaaccatatttttaaaatactttatttttattttatttgcatatatgtctgtgtgatggtgtcagcttttagagttacagacagttactagctgtcatgtgggtgctgggaattgaatccaggccccttggaagaacaatcagtgctcttaaccactgagccatctccccagcccatgatcaaactatattaacctggaaggaatccacagcttttcatcttctgtggaaacaaaagcagaacctcttttccaaagtaacctgtccttagacccaaattttgaagtcaagatacctttatgttggtttagcttagcagcccccacaatcaaatctctctctgcagttagctcattaacaggcaaaaaagttaaagaaaatacaataatatttataatgcagactctgtacattttctatctttacatggcccattataatttttattactctatttctcctttaaggaccttagtttattatccttaaattattttttatctgtgtatgattcatctctctctctttttttgggtttttcgagacagagtttctccgtgtaatagctctggctgtcctggaactcgctaagtagaccaggctggccttgaagtcacagagattctcctgcctctgcctcccgagggctgggattaaaggcatgggccaccaatgcccggcccgtgaatctgtttttattgtgtatctgtgatcctttttttgaggagaatttttaaaatgttaagcaggtgtggctagatctaaagtgacagctttggctgttggctttgccatgttctgctttccaacatggaagtagcaatgagcatcatgcttaccactccccacctcccccccccactgttgccctccaggaacctgtaatactattttccttctcaagtctttgatggggttgaagactagatggctccagttacaatccttatattttaactaagagcatatgaggtatgagagtcagattcttcaggataggacagctatcagagtaatctctgtaatttgtcattcacccagtctggaatttagtatgtgtttcttacttgacaatgttcttgttggttgtagttccagttttgtttgttattaccccttctttctcctggaaatatttgataatcattctttttgtatacagttttgtattaggtttagaaccttcttatttagacaaaaaaggggaaatgtagtgggtatttcctccatccatgaccttgggctatctggcctgatagaggcaaagcttctcacctgcctatgtgacctcttagaaaggaaggagggagggggtgcgctctcttgggtggtgaagactggtcaggtggcatgaagaagtgtgtgatgggtctccatcttaccaaggactgttacgataaatctttccgccaaaagccgccggagccccaccgccacatgtgcactttacgccagctgcctgcccgagttagggcccaaattaatacacagaaacttgtattaggtacaatgctgcttggccaatgactaggattcctcatctgttagctcagtcttaattatcataaatctatatattttataagacttatagaggatgcctttcgttggggccctctcttgctggtggctcacatcccgctgctggaggaggcaaaggggaaagagaacatttcctgtttctcctttcttaaatatgagtctccttgctatgtcacttactgcctggaacaccacttctctactacatttcccagaatcctctttgactcctagccctgcctaacttgctgcctcattgacctcatttctctactacatttcccagcatcctctttgacttctagtcctgtctaacttgctgtctcattggccaaacaagtactttattcaataatcaataaaatgaacatacacagtacattccccatcaaaggactgtgcaactggatttatcatatcctgtattcatgagtgtatttccctttttcatatcttaataaatccttgttaccccttaaatacactacaatctgcctttaatctcagcacttgggaagcagaggcaggaggatatttgcaagttctaggccagtcaaaggtacagtaagaccctgtttaacaaacaaatctccctctgaataacgtcaacaacctccaccaaaaatccaaacccaaacctgtggtgatatattatttatgatttaataaggattgcctgaagatcggaaaagcaaccagccactagctcttacctctacctcagactgaaaggggcaatcctgtcttcatgagatggaattaaaggtgtgagctctaattcttttttagaccgattcaatcttgtgtaggccagggtggccttgaactcagggagagccatctgcctctgtctcataagtcctgggattaaaggtgtgtgctaccactgcctagctctatgactagctagtgtggctggctttgcagtctaatacttcaggcaatctttattaaatcataaataatatatcactacacaaacccaaaccaaataaagaacccaaggtagacagcatctggcctccatatgcatatagtgcatccatatgaacacacacacacacacacacacacacacacacacacacacagagagagagagagagagacagagagagacagagagatagagaaacagagacagaaactgtgtttgatacagacttagagggctggatatcatagctgttatcattactgtatctgagacaaggagctgagccctgctgactttcttgtttgacccttttagtctgggacacacaactctcttttcctggcatgcctctcctcgtgggcaccccacacctgccacgaaatccatccattccttttccttcccccccctctctctcccttttctctcttaatatttacttatttagtgtatgtacctatacatgtttagaggacagcttgcaggagttggttctctcctaccatgggctctgggaatcacctggtttgctagcaagtgcctttatccaattgagccaccctacagacccaccccccttttggatgcagcacctcatgtagcttagactgtcctggaatttgctaagtagccatggtttgattttaacttttgattctcctgcctcattcatcttcctaagtattggaataatagatgcatactactacacccagccctactctcatttcttttttcttaaagattttatttatttattatgtatacagtcttctgcctgcatgccagcagagggcaccagatctcattacaggtgattgtgagccaccatgtggttgctaggaattgaactcaggacctccggaagaacagtcagtgctcttaatctctgagccatctctctagccccctactctcatttcttaatgactggtttgctctcagcattttttttctgagactccgtagttaacaccaatgcattaaaggcttggagagcaagttgccacagtaggacagaagtctaagtttatcacctggcatggccacctcagggataccttatgagctcctcaaattactatgccttgatgtcttccacccaggaagtccaagttttgttcactccattctggaacccggttgcttctgcactcctggagttgatatttcagtgcctgtactggttttaattcccatcttcctccctataggctcacactgggctactgagagttggtgagcttctttgggttccagagtacagagctatctttctaatcaagaccataggagatgccaattggggagccactctgcctcctatgtgagtcacatctgagctacagggcctgttgacaaaggctgtctgcttaagttccaggagcaacaggttggtttatcctctaggactcatctgtcccctccacacacaaaggacaacatctgaatacattttattccattgccattgattagtttattagcaaacaggtcatttagaaggtgagacctctgacaaactgcatattgccatatacttgtgagaaactttgattggactccagctacttgggcaccaaaggccagtcctccattcatgtttgcagaagtgacctgattaagctttgatatggcttacttaaaaaggatcacactgaaaacagggttggatggcagtgcagtgcctctgggagggagaggatctggaaggtgtcccaacctaccctctggctgctccagtgaaaggagcaagcactgaagacccttgcctctggggtcactcaagaaacagaagatgacacaggaggggcagaggaaggggctgggtggaactgactgtggaatcaattttaggaaaacagggacacaactacctaagctccatagcaaagtgaaatgggccagccctgcagccctaataaccttgaggccactttcaagccctgatgtattggggcaagggagcctcatgcttgggcatgggacaaggccttcaccctacactggtgccatgctgcctccttcagtctggtcccagagctctgctgtgctagcccaccatgcttcttcgagggatacagccttccatctccagggcctctggccagccctcatacttgttggtgtgcttactgttcttcacatgctgtagggattaacaggaagttatgatctggccctcagtggccagccaccagggtactctccaatctgttgcccttctcttcatgcagggaaaacaggggatggctgaagtggtctattctctcacacatgtgaacttgggatgagccatgggcctgatgtataccaggatggtgagcactgtgcacaggagggagtccatgtagccctggcttcagggaaatgctggaagctgctgcccaagtttggagtgaagggtcttggagggcatgagcgtgagttgttgggaaactgggttgtgacaaggctaaaatggtagtgagcatcttgtttttcccttttaatccgagacagtttctcatgtagcccagactgtcctcaaattttctatatggccaaggataatcttgaacttttcattctcttgcatttacctccacagtgttggtattacaggtgtgtcctcatgcccaattttatgaaatgctaagtattgaatgcagggcctcatgtatgctagacaaccacccaccataaatgagctacatccttgaactgagcatcctgaaggtgtttgtgaagaagttttcttagttataagtctggccaatgtgcaatctgacttttaaagtatctttaggtcgaaatacatacaggacagggaatatcaaagttactgtctctccctgtggtaataacaaggggccagggctaaccagagcacaggtcagagacagcgctcagggccctgagggatagaattcagggaaactttggtgtaaagagaaggggtagccaggttgccaggactaggggtcagaagtgccagtttctctgctgtacctgctcaaaggggctcttgttctgcacacccttggctcccacaaacacccagctgtcacggaaggctagttccttggcgttcctgctgcccagctcagaaaaaagcttcctggtctcttcattcatcctgtcacacagtaggaagaaatgtgaactggggactgttactgtactgggacaacactgaagctggatttggcagtcacttactttgtagctggatcatcataggatgccacaaacactagggtaccttcatgcagtggccggatgaacttcaaaagatcattgacatctggtggagatgggcccacagaacacagagcttcagtttccactgagaagcccttccccaccaaacaacattcttctaatgaggaaaacaatgtagggactaggcaaaggctgttccacatcgagggctaccagtatgagcataggcaaactggtaaagaagcgaggccatctggtcacaaaacatagactccagacagagatcccccatctctatattttgtgaggccaaagctatacttgaaaagctgagtgcaaagacacagaaggcagggcctcagggaaaaaataataggatgctgtggtagccactcacctccagcccacatgtcaaaggctctggcttccaggagctcaccactgacccctgtggcaagaagaggaagacctgctaagcaaactgtttgggccatgctacctttctgttttaacccctagcccaggctcaagtatagaagcttgcagcccttccagatgcttcaaacatgctgtcatcctctcattcacagagctgcagcccatggagcctctggcatgaggtcctatgcacccaccactactatcatgtttttgttaactgggtgacctcctttctggagcttttggctggcatagaatttttcccaagcttcccctggagtgcccagaagccacctgcacctgcagagggagtaatgaaatgaagggggcaggccatatcatgatatctgcttctatggtctgaactctgaccccacaacatgggggactcaccattcaccagagcgatgttcagcccacggcccacattgtccttgacgctgctcatgagcctagcaggaggggcagaagatcccttgtgggcatatcagattttctttctcacatagctgttagcccttggcccttgcaggcctggtctcaagttccctcccacttcccagcccatgtgctcacatcttgtcctcgaggcagatcttgggcccgatgacattggcagccccgcnnnnnnnnnnnnnnnnnnnnnnnnnnnnnnnnnnnnnnnnnnnnnnnnnnnnnnnnnnnnnnnnnnnnnnnnnnnnnnnnnnnnnnnnnnnnnnnnnnnnnnnnnnnnnnnnnnnnnnnnnnnnnnnnnnnnnnnnnnnnnnnnnnnnnnnnnnnnnnnnnnnnnnnnnnnnnnnnnnnnnnnnnnnnnnnnnnnnnnnnnnnnnnnnnnnnnnnnnnnnnnnnnnnnnnnnnnnnnnnnnnnnnnnnnnnnnnnnnnnnnnnnnnnnnnnnnnnnnnnnnnnnnnnnnnnnnnnnnnnnnnnnnnnnnnnnnnnnnnnnnnnnnnnnnnnnnnnnnnnnnnnnnnnnnnnnnnnnnnnnnnnnnnnnnnnnnnnnnnnnnnnnnnnnnnnnnnnnnnnnnnnnnnnnnnnnnnnnnnnnnnnnnnnnnnnnnnnnnnnnnnnnnnnnnnnnnnnnnnnnnnnnnnnnnnnnnnnnnnnnnnnnnnnnnnnnnnnnnnnnnnnnnnnnnnnnnnnnnnnnnnnnnnnnnnnnnnnnnnnnnnnnnnnnnnnnnnnnnnnnnnnnnnnnnnnntcagcctcaggacatggctggggcaggccgcacttgtacttcctggtccttggttctgagtaatgatagcagatgtgacccatgtgcctggccctggtgttacctgagatctgagggtagaggtcaggaccagccacatgactgaaggagcagccacagagcatggaactggggaagacagtgggtggggctcagaccaaagctgggaatgcttccaagtggtgtgttggcaagggagtaggaactccaagaatgagggttttttgctactggtaggaaaagggaaagggggttgagagctggcttggaacacttatacaatcagaactaagcagaggtccagaaaatcagggtggaagctccatggataaggcacacagtcagcaaagtagatgaactggggtgggtgggtggagcatgcgagctctgctagcctctggatttcttcagggtgagggtggggatgacctctataatggcttggattataactctacagaaaatatactggagtctgaattcccagtttctcaggggtcttgctgggaaacagggtctttacagacagataaattatgatgaggtgtcactggactatggttgagtccttaatgcaatgtgactggtgtcctcatgagaagaaaagaggtaaaaccacacagaaggagattctgtgagacagtacaggaaaaaggtagagtggtacagctacaaaatgaggaacaaagaaggcttctaggatctgcagaggcacaggaagacctttaactggagctttcagtgggagcacagccctgctgacaccttcattcatactcttggcttccagaattgtaagaaagtaaattttggttgtttaaggcactatttttcataggatagcttcaggaagctactataggttttggtgccaggaattgggggggttatgtaaataaataccacaaatacctaacaatatggacatggatttggaactgggtagagtggataaaggatgcagagctctgaggtatatagtagaaagagcctgtactgcttaaagaaaaaaaaggaaaaaaaaaacctgttggtaggaatacagagtaaagccaggtatgctactgaatagctgtaatcccagcacttgtaaggctgtgtaggagaatcatggtttcaaggctatcctgggctacacagtctctgtgttaaaaccaatttagcaagcaatatggatagtaaacacagttctggtgcaatctcaggaagaagagaataatagagaagttttttttttttttggttttgagagacaggatttctctgtggttcattttaagatgagagcagacagagaagttgggggaaaaacattagtcatgaaggagctagaacataaacataaaaaacaaatcctagtacttgggagatggaggcaggaagatcaggaatttaaggttattcttggttatatagtgaggttaatgatagcctaggattcattaaaaccctgtcacaaaagaaaggagggaagaaagaaaatgttagcctaattgtattgtaaaaactgagaaagcagtccaaacctgtaatcccagcatttgatatggtaacacaggaggatcaccaagagtttgagaactacatagtaaattcaaggccagtctgtgctatagagtgaaactctatcaaaaaatataaactattttatgggctaggaaaatagctcagtgtagagtatttgttcagtatggatgagatcttaggttcaattaccaacaccataaactttttaaaaaggcattcttgagagagaacacaaagaggatggctggcttagtatttactaaagaaaggaagcatgtgattgtggttatgcttccacctttcagaagcctggacttgatatgggattatacaggatggatctctggaggactcttttgtcttataacctggcccctcataaatcacaggagaggctaggaaactttgttagaagtttataccaacagaaacactcagcctatgaaaagaacaagagattagaaggaagaaaggaaggaaagacagaaggaagaaaagaaacaaggaagggagggagggaggaagaaaataaggaaggaagattctgaatatagagccaggaatgaagaggccaaagagggaacccaagacaaagggtgacactatctcccattccagaggatggggtcactttagtgggtctacaagcaaagtatatggacatacacatttctttttaggtcttgaaatctagaagaattgccctgctatgtttgggatttgcttaggaccatgagtgcccccccccctttcccaatgtcttccatttggaatggtaatgtttttttcctttgtctgctcctctcacattctgatgtaactttactaggttgacagcacagaaggctatgatagctagtggggaaaaggccagatgaacaacaggaatcctggtgggcttggctggcagtaggcagggctgtcacaaaaggcagtatgaagttctggcacaggacaggatagggaagggacaggaagcttacctgcagtcactgagttctctgggcctgtggatacagagagttgtttctgttagcacagaggcctccaggaacctacagcagaccagccaggatcagggacttggggtcaagtcaggctacacttggcatattacccgctcaagtctcaatgatgccctgatgtaaaattgcctgctccaggaaaaggatgaattggaattgtaaatagtgcttaggtgacttggcaccagtgacaagatgtagagtcccttgtgtatctcagagcccagcagaaagtccaagatgatcaagtgttcagtggaagcctttccactccttactctcactctatcaacttccactcaatattggattgcaattagggtgtgttgctctcatatcagttggtagggacaaggctgcatttgtgttagaagataggctgaaggtagcaaaaagcctgtcaagaaggtgatggaaaacccagccatcacaccccatattgaacacctgtacagtgagtcaagagggtccccacactcactggtgaagaattgttgaattcgaggaaggccaccaccaggaccacccaggaggatggtgactaggatccaggagagacccatagtgatgattagggccacgatgcgaagggggcctgcaggcaggacagacatagggcaggtccatctcagacaccagtgaagaaacacagcaacaacccactgcctcacatgactagatctccccttctatttggcaacaagtgatggcaggatcgaaaggtggaggaaccattgctacccaccagacccaagtaggagacatgaaattactcctggtggagggaagaaagtgagtttaaatgttgaggttactatggttttccccagcaggtttggaaggactttttagaactcatgctctggacaggttccatattaccaacctcagcatcttgcctctgaaactgtcagtgtatttacagctcacccatctgtctctcctttcctcttgttctgatgaaagatctaaacttttgaagaccagtacttctgctcgcttcaagatccatcaagttctctcctgtctcaggtatgttgtgttaaggctccttctttctatttcactttcataatattaacaggtcctaacttaataacataaagatgaaacagagctcctgcaagaaaaatctcatcctttaactcctcaccttccacttccccaccaaattctttaaaactttattctttgctggggatatagctctgtggtacagcatttgtccagcatgcatgagaccctgagttccatccccagcatacacattaaaaaagtcatctacattgtgatttctatcatctcaccctccactctcccaaaattcatccaatgtagtcttgccaccacaacagcaaacaaatgaccttccaaaccagaccacccatgactttcatgatataacatttctgattgcctgcctgctctttgttgacatctgggtgggctaccctagccatcctgatgcaaacacttcactgctagcttttagcacagtctcctgacctgagtctttgggactttctcttttttggttatgtcatcttccattactctttcctcaaaagctagtcttttccaggctgccttctcctgtctgcatactctctttatgggagatttcatctaccacaattatcaagttaaacaccatgcagcaatgacaccttattttctggctctagtcctgatcaatcttgaacccacatcctccctgtcagttccttatagcccttaccagcccttatctatgaagttgctaccttatcagttcttgaattgtactcttaccccaatcagtctgatccacgaaccattttcatccccacaaggtatcttagttgtacagctgacagcagccacgcctctctgctctactctccacccctccccacccagacactagactctttggaacctctttctcacaagtcattttccaaaacgcaactggcctgttacttgagttgggtgtaagtgactatatattaatccttaacttatagtttgggaagctgaaatcttcataggtgaaagaatttgctcataaaataagtgtttgtgcacagtcatccattaataaataacaaaccagtgactacctgggcccctcctgacacaaccactatgacgtctggactctcttccgttcgctgtggaagccacccacctgccaacctcatgtccacttctcccactgggttgggacctccggcaggtgcactgtttggggaccgtgggctctgagaggaatgaagcaggagagtaggttgggtggtggggtagggacaagtctgtgctgggcacgatcggtgctacaacttgttcctccagacaccagaccaggctcagttcctcgtgagcactgggagaagcacttcctagccagcagggctttggaaacccgtcgcggctctcagtctggctaacagaagcctccaggactggaacgtagcaattgttctccctgactcgggcccctcccgtgctaggcccggggatcgggtcggtcctgttgaggctgccggcagagacccggcaggccaatgacgctgcctgggtgtagaaggacgcagattggatcagggattttccagtggtctcgatttgcgggcgaggtgaagcaaacgagtcacgcagagaagcttggccagcacgacaatggcggcccagggagggtcacagcccacaggcgccgctccgccataagcccacaggctgcgctgtggggccgcaggtccccacgcaggctccgccttcagacccgcctcctccctcttctccagaggctgggtgggaggtgcctagagaggctatttcccttcagcttgtactcaagctgagccacctagcttcctggaaagagcctgagtcattgctgccagatgaatctcctatacttttttttgagatcggatcacaccctatagttcatgctgggattacaggtgtaaaccaccacagccagcttccccgctgcctccacacgctctgtttggcgggagatcttctatttatacaattggtgagccgaagctctgcttgagacttgagatcagagctctcatggctggtaagagaatggatctggggacgtagataatgacattaggttagcatgtgttttttaagaacacggaaagtccagaagcacatgtggaggtaaagcaaagcctgagtcccagagagtggccctttggttgctttctttctgctctgattttttccccagggagtctttttttttttctattttatgtatcactcagtgtgggatgtctggaatgtaaccctcgttcctcttgcttgagctttctgtctcgaccacctacactgccagggcagctgagacagttcgttcagctggaatcatctgtctcctcaggcagcagctggacagaagtaaaacagcattcctgtcctttgacccaatgatcccacttacaggaactccaccacttttaggtaatgctccaaaatatagaaaaagtttatagaagcactgttttggttagaacatagcattttcaattttggtacacctgtaatcttgctacctgggaggtggaggcaggagtatcaagagtttaaaggcatcctcggccctttatcaagtttgaggatagactgagattccttagaccttgtctcaaaaaaaaaaaaaatggtgggatagagatggctcagcggttaagagcactagctatttttcagatgtcctgagtttaattcccagcaatagtgtctcacaatcatctgtaatgagatctggtatcctcttctggcctgcaagcatatacatgtaggcagaacactgtatgcatactaactaactaattcagtgtcaatcatttgttgttgttttcgagacagggtttctctgtggctttggaggctgtcctggaactaggtcttgtagaccaggctggtctcgaactcacagagatccacctgcctctgcctcctgagtgctgggattaaaggcgtgtgccaccaacgcccaactcagtgtcaagcattttttaaaaatggtggtaatggagtcaggtgtgctagtttatgtctgtaatcccagcatttgggagacagaggcaggaggatcagaaattgaaggccaatatcagctaaaagtgagtttgtggtcagcctgaagtgcatgaaaacctatctttaaaaaaattgttgagtggtgatggtacatgcctttaatcccagcaattggttgtagtgatattgtgtttatacgcttaacaaataaagcttgactgaagatcagagggcagagctagtcaccagctaaccatagaggtctggaggtctgtacagacagaaagtgagatggctgggttgagagaggaagtgattaattaggcaggagggggaggagacaggagcttggtctcttttcagtatgtggatttttgtagagataaggatatgtaaatatgagtaattaaaaataataaaaaattaaaaaagagctctagtggctggatgctctgcttctctgatccttcagttttcaccccctaatatcatactctggactgttaaattattaaggcctattagaacttgtgtaacatattggtgcccaacttaaaggcatgaactcatggaaaagccacttgtctgtggctttgagcaaccagcacaggccagagctgcatgaggggctcccgctggagtcactgccccccctgcccggctaggttttcttttcttttttcccaagctcttagcaagtttgggattttcttgtagcctctctaaaacagtttcaagatgccacccaaattccagaggcatgtgggttccaaacgccacaggatttacctaccctagactggctggctctgccttcaggcagctcccataacacatgcttcttctgcacaattccttgtgtgtttttcagacagcctgctttcccctcccttgtgggttgcaggctttccctagaccacctctccttgggctgccactctcagcacatggctacacactagcagctgcagctgtcctcagccaggttgtacaccacctgtattctctgatcagaagtgctatgcagctttaagccccaccatcttccttggaagatttggtaagacaactgagaattattaaaagggggaattagttaaaaagagagagagttttccccatattaaataataggaaacactattacagtgaagggatttaggtctctgtatgataatatgctggacagtttgaaaatggaacaattaaatgagaggatagctaatttagatgggacttataaacatcagttttatcatttttgttttaacactaaaaagttggttaatatgagtgctaagatacaagttttagaaaaacttaataaaacagattttacagatagtcagacccagacagaggaatttaatggagaaacaatttcatcatgcattacaaggttagagaggaacagcctaaggttttcaaacaaccaactttaatttatccagtcaggaactgccaaatgacagatatcgccaagggtgctcgagttaaatggactcctgtggaaatgttagttttaaggagattcaaggaagcaacagtctcatatggcatgcattcacattttgtgaagcagatgttaaactcatgggcaacttgtaataggattatccatagagattgaagagactttgttaaagctgttttagagtgtggtcctcaattacaatggaagacctggtgaaaagatgaggctaatatcttagaatggatattttttttaccacataaacagagtaaaaattaaaaacttatgtggaaaagatctctgagtagttgattctaaaaggaaaattgagacttcatcaattagcaggaatagacccagcaaaaattgtagtaccagctgggcattggtggcctatgactttaatcccaacactcaggaggcagaagcaggcggatctctgtaagttcaagaccagccttgtctacaaagtgagttccagggcagcctccaaaaaagcaaaaaaaaaaaaaaaattgtagtacctttttactaatgatgaaattgacaaattatgggcataaagtgaatcttagtaaagagtttacagtaatattttgggagagatttacaacaactatcccaaaagcaagagaattcaatttataaagagaactaactggatccctccttgcattgtatggggaacaccaatatttggagctcctacattttatactgatgcaaacaaatcaggaaaagcaggttacaaatcagaaaatttaagtaaagtggctcaaaattcttatgattttgtccaaaagtcaaaattatatgctattcttatggtattaatggattttatggaacatctcaacatagtcactgatatgcagtatgcaaaaagagttgctttgcatattgaaactgctgaatttataccagatgatacagaattgactttattatttattgttacaagaaataatcaggaataggaatcattctatatataaaacaaacatctaatcccatggccctctagcacaaggtaatgatgaaattgatcaactattgatacacaatatgctggatggtccttcaaggttcctgctttacagaagaaagcaactgatgaactttgccagtacaagacagagcagatcttcaaatttcctactttattaaaaagtctacccgacactatggcttatgggctgaagatggatgccccaacattacaagagaaactttgactgtctaggcagtgagatgtctttgtcaattcttttttttttattcttttattagttcaaattaggaacaaacttgtttcacatgtcaatcccttctccctctccctcccctccagtctttgtcaattctatagcttatatattatccttctggggtctttgatggagttgaagacagatagttatggttatggttttccttagttatgataagatattgttacatattaaactttagagtcacaaagataggatagatgatagaatattttctttaaattttgccaaatgttagcaaactaaatattgttaactatagttcttgcttgataactgttttgttatgtacttttactatgtcaaagttcaaaccttcttttttatttagaaagaaaagaggagccaggaggtggtggcacacgcctttaatcccagtactcgggaagcagaggcaggcggatctccgtgagttcaagaccagcctggtctacaagagctagttccaggacagcctccaaagccacagagaaaccctgtcttgaaaaaacaaacaaacaaacaaacaaacaaacaaacaaaaaagagaagatgatgggggtgtccttctgaatacatgtttcccttattggttgatgagtaaagctgttgcagccaatagacaggtaagatgtagccaggaaataagcataggtggggctaccagactaggaaaattctgggaagaggaacgcagagagaagttgccagagagatgccatgtagctgctgagagagcaacagggctgggcatcaccagtaatcaaaggcaaagtggagatatacagattaatagaaatgggttaataattaagagcgagctagccaaataagaaacccgagccatcaagccaaacagtttataattaatagaggcctctgtgtgtttatttgggactgaagggtggtgggaccaggctaaacagaaactccgtcatcactatgataacaccactaagttgaaaaacaccacctaaagatcagctttggactataaacagctcaggacaattttgaggtggctagctgaggtgatacagccctgcagactactctagccaggactcgagacaagccctgcactttcccattccgcagagactggacaacaaatgatacagctacctctctcaggacttggcaattaacccatttgtttttcttttcaggttctcctaaagatgctgtcatccccagacagcaggaagtaaaattaagaatatgatgtccatattcccaagaggcaggttgtgtggtttttggtccttcattgggtgttacgggtatctgtcattgtttaggagggctggttacaagttgttattggtaatgttcaggaaaaaagttgaacaaaggagattggattcagagttattgttttgaaaaaagggggctatatatatgatagggtataagggtagattgttgaatgtactctagaaagaaataaagggaggtatagaaataggataaaaaggtagatttttttttggtttttcgagatagggttctctgtgtagctttggagcctatcctggcactcgctctggagaccaggctggcctcgaactcacagagatccacctgcctctgcctcctgagtgctgggattaaaggcatgcgccaccaactcccggccaaaaaggtagattattgaatctattttttttaaagattttatttgtttatttgtatacaacattctgcttccatgtatatctgcacaccagaagagggcaccagatcttgtaatggatggctggtagccaccatgtggttgctgggaattgaactcaggacctctggaagagcagtaggtgctcttaaccgctgagccatctctccagcatcctgaatctacttttaaaccccccaccaaaaaaaaacaactactagttttaaatttttacattggcttgtatttttgtatattgatacaaagttgaaattatttttgttagaacatactgtacatacatttctaatcttgttaaagttattgtatctatttaactcatttaacagtgtaattcaaatttttagcccttgaaaattattattactatttaggataataaggaaatgcaggttaataattagtcacctattacaatcaaacttgtaataatcgtaagtatgtcttcaaggtcaaacagatatgttttagatagacaggtcatcttcaaacacttgagaccttcagaatatggtatttaagatgttttaataatgtaagttctttttcttcttcttttttatgacaataagacatgtttgctcctgacagcaccaatctacttcagagaagatgatgggcattgaagaaatgccacatggagtttactttctttgtggcaaaggttagccactgggagacaaagtgggcaagaaagtgttcttgcctctactgatgatagtgtgctgtccaaattggactagcaggatacaaaagaaaggactgctgaacttttccaagacaaggtaggacagcccttcagaatattctgcttcacaaaaaagtctgtcagacaggcctgtaggctgaagatacatgccccaacgttatagaggaaccttgggtgaccctcagacagctgcatcatagaaaagtcctgctaccataccacatgggtggcacgcacaaaatctctttgtatcttgattgcaatagatattatatggcacagacacatgtgtatgtaggaacagggtatacatgggaaatcccatacattatgctcacttttgctgttaacctacaattgttctcactctagtttgattttctattaccatgacaaatattatgaccaaaagaaatttaggaaatgaaagggcttatttcatcttataattcccagataataatctatcactaagtagaagacagggcaggaatttaaggcaggaatctgaaggcataaactaaagcagaagacatggaagaatagttgccagtttgtttccaggctcacattcagttaccttttttcatacagcccaactgggtctacctgcctagagatggcactctaggcccacaatgggctcagtactgctgcatcaatgaacagtcaagaaaatacccccccccacagacattcccacatgtgaactctatgcagacaattcttcaagtgaagtgtcttcttcccaggtgtgtcaggtagacaacaaaatgagtctggcaacttcactctgtgttcctcttcccagaatccccccccccccccccccccccccgcggcgctggggggggggggggggggggggggggggggggtggggggttatatttgggaacaattagggaaaattttcaaagtcttatgtttggaattaaatacttgttcccagctattttcattggctggctgtagaagggaacattttgtggtttctgtcgttttgtttgtctcttacaggtgggctattgcacacaataaccaggaactaggcatcctggaggctaagggggagggtttggtctgtcctggagttcctctgtgtccagcttttctgagaatggagttaaccttgctctttcagggtgcacctttgtaatcccagctgagagactgaggcaggaggattgcaagttcaaggcctgccttggctatacaacacattttagaccagcttgggttacaggagaccctgtctcaaaacaaacaaaaccaaaactgcactaagggcctttgaggtgtttagtatctttgtcagtcactctccactttattttaattaaaaaaaaaacttttttgtatgtgtgtgtacatgtagaagtcagagaacatctttgaagatccaattctctccatccacttttatgtgggttctagggttcttacctgctgagataccttgccagccctctatcttacatcttgagatgaagtatctcactgaatctgagacttgccaatttgctcaggttggctggtcagtgagctatagggatcctcctatctttacctccccagtactaggattacagatgatcactgtcctgcctggcacatgggtgctggacattgaactcatgttttcatgtttgtgtgatgagtactttatcaactgagggagctccttggctctgacaagcccccttagctaaatttttaatttttttgagacagggtttctctgtgtagtcctggctgtcctggcactcgctctgtagaccaggctggcctcgaactcacagagatccacctgcctctgacttccaagtgctgggattaaaggcatgcgccactactgctggacttcctggttatgtttctctctggctttttgtagtttccattattgtacttctaggtattgatctcttttggtgcatcctgcttggaattggttgtgttctgtacctaaagataaaattacagcagtttgatttcattatatttatttatttagtcttttcatgacagggtttctctgtgtaataaccctggttgtcctggaacttgctctgtagaccaggctggccttgaactcactgaaatccacctgcctctgcctcccaaatgctggaattaaaggcgtgcatcaccaacacctggctgcatccagagctcttaactgctgagccatctctctagccccaactttatccttaattgccaattttttattattaatcaaagtctgcagatctattctcagacccagtgcagtgaattacctttatgtcaaatttccattcttcatttttaattttgaaatgtggtgcttatgtttctcagactggtatccatcttgctgtatagacaaaggtgaacttgaacttctttctgatccacctccctagggctgcactttccttaccccttgcttgtaacctagtattcaagatcctacgtgacaattgagagtccccatctgtgtttttgtgtcccagagttgaaatggcagctgaatgacttcacctattcatcattctctacagtatagggatttcacttgaatgccatcatttggaccttcatttatgatttatgtggctacatggatctgagatggtctttgctgactattgagcttcactgtcatggccccgaagtagaataaggtagaaatgaccaattattagacattcgtttgttgatttatttagtgatttgtttaaagtactgcttgtactgcctatttgctaagcatgaatgacttcacttgctacctggaacagaatgacctagataaatggctgaaagaatgggtcattgcccttaacaacctgatgactgccacaaaggcttctgtaaattctgcttgcttgacaacaccaccttgtggttttagagtataaaatgaaaatgcaaactagacccagtattgaaacctttcaggagctatcctggctttacttaaatggtgacatctctctttcactctcatttgtgtcagcatgcttattccagaaagattcctgcaacattgtacctctcatttctgaagtgctgtttgcttattgtgtgtttggtcctcggtagagactcacatctgaatgattagctgaatgtactcacttctctcttgtgcttctctgtgttaggaccctgcagccaaggtgaaaggcaactaaacctgggccttcatgactaccataatctgcttatccagagacagccaatgttgtagcccagacctaatgtctctattctagtgcaactacaaacacctgagatgacagttgacttccatctagaagtccccggtttcattcagtataggtattcaaatattctatgccagtggaactccccagattagcccatgaatctcagcaccaatgttggcaccagacctaaggtaatgtactggagaattggcttagtgcttaggtgtgcctgctggtcttgcaaaggacctgagtttggtcctcagcacccacatcacacagttcacatttcgagttccagggacttgacaccctcttttggcctccaggggcacctgcatgtgcacatacagacatacacataaataaaaaataagcatatattttaaaacaactaaggtgatggatgactctcctcagcatatctgtcattttttcccatgtggactcccatagctgaggtgacccttaacccatgggaatctcaaatctcccatcaattgactgtgctcatttggtccctcatgattgtgcttcagtgtaggcattcagagctgaggtgacctgtgaatatgtttactgaggatcacatgcctcttccccattgtaggttcatggagctcatgaggaccctcatgtatgttccaagaggtaaggtgacagtagagtgtcttcactagagcctttggcttctgttccagtgtacacacaccaccaccaccacccagtgaaagagaatattctaaagagacacttgtgctccctcttttgctatttagacattaacctcatgccaggaccctaagtatggactttgcaagggggcggtcactggatctgttcatccctctttccaatggccacattgaagaaatctttttcacaattaacttggctcttttaattggcttattgagaatggatgtctgagcctggctcattagggctgctaggggcatactctcttaaataacaagagagacccttaagagtctgtgatttgtctctgtctccaatcaagggccctttcccactatttgctgtgcagggaaagctctcctctcacaacctggaggtaccacttctacatgaagcaggggatgcagtaaacactccagtatgggggtgggtagaggtgctgctgtgataaacttagaagagtctgtatcccccctgcctttgtgtgaattagcctatcatgtcagattgtgaggttgatctcccagcaatgggatgatatgtggtcactacctatatcagggttaaaaaacagaggacaagtgagctccctagtccaatttgggttctggcacactctttttgcaaaaagaaattgccttgctgagattgcacaataccaagattacccttctccaacagtgccatatgccatcctagcaaataggcaagaataaacttggtaatgttctttcttttgcctttatccatttttcttgaaggtttctgggaaggagcctcagctcatcctttaggtctgaggtcctgcctgccatcctcaccctaaacagactgtattgccatcctggataggagagcagggaggggtgaggatacccagttctcaatagcaggctagtgagaggtcttgaagatccactcaaaatccagatcatttgaggtcagaaggtccaccctaaatctggccacacctggtggcagccaacagaaaaggacatggacaaaggaaatttgtttttttccctgcctgtcttcactttcgctggcaagttcacaagccatttctttgctgggcttagaacccacttctttgggattctaacctagactgaaaactgggactccagcatgagattggggctgctgtggtacccagtctcatggacttagcaactactggatccttggcctttttgtctagagacagcattgttggactacttgtactgcagcttgtaagcaacatatatatttataattagttctgttcctttatagaaccctgactaatatacatgggagtggaggaaataagtctttccttcatagatctggatagcagggaggaaatgacaagggggacaggtaaaactgttggaggatttaattgcaaggttggggtagggaaatcatagctgctacttctgccttcctttggtgagaaggctgcctgtgggtgggatgatgaccatggagtatggagttggttaggggacatctctagtgccacaatattgttaggcagtatgtggtctcttccagctggtgaggaggaatgtcaagtggcactgaagctggtgtggccatgggcaggtcttctcacatgggtgtccttgaccatttcatttgaattttgaggagcttgcccatagacactagggagtgtggtttggtctttatccctctgaggctcaaggttcctccccattgttcctaactcctgtcttgaggagtctagggacagactgataggctgttcttcttccctttgcaggggctggagtgaggggaggaggtgatttgcttcttgtggagagatgggtggctcagatagggtcaatggtggccctgaaagcattacagtgagttttgagaacttggagaatttgatagttgaggaatgtagctggggtcagtggtggtggtaacagcagcagcagcagtgatggtggtggtggcagtggtagcagcagcagcagcagcatagggtatagagtggtggcacgagcccagggactggaatgtgtggctaaagcctatggtcccaaagtcgttccaatgtggggctaatagtccaaatatgaggttaggtggtaagaaggatagacacagaaagggtgtccaaaaggggcagagtgcagatggtataagttcccaaggctcagagcttgtgagggttcacccatttgtaggtgccctatctgcctctgtggggccgcggctgggaggcaaagggagacatgagtgacccttgtccctggtaattcccactgccctgcttcatttggcatggctcccttagctcccatccttcccttacctgccataaacataggggataggctggggcttctcttgatcaatcttgtgcagcagtggtgtgaagatacgccaggcttccctgagttcatcactgaagggatacagtatagaatggagtggaggcatatgtgtggggagggagaaagccacttctgttaggctgggggtccctcacctgcggacaaagtgcatctggctcccacagaagacatccaggatgaggcgttcataggcatcagggagcttcacattctgcagggttgggaaaggggtaatgttgctgataccactgtacttgcctacctaggtcctcccttagggccttgcccagatggtccccccgtgggaaccttgtatctgttgccataggtcaagtccagctctgactcctcagggttgaagaacatgccaggcttcttggtcatcatcttggtgtatacagcctcattgggctgcacacgaatcaccagctcattacgcttgcactgctgctggaagatgccccctgccacatctcggaactgtagtctcacctcagccttgcgttcattcagggctttgccacagcgcaggatgaagggtacccctaaggggcagggctggcctcaggaactgactttcctatagtcttgtgttgtgtgaatgtgtgtgtgtgaataagggagggaaggaaagaggaaaggagggagggagggatggaggaagggagattcctggtgcctgtgtacatgtgtgaatgtgtacatgaggaataaatatgactagggtggtgttccacttgtgccagccctccttccagcatcccttaacactcagcaccatgtgtctgaccatgctaataagtgtatatttgagggtacatctagcactacctttctgggtcctagaggtgtcacctaccatcccaccgctcattctccacatagaggacagctgctgcaaaggtggcagtggtggacccacggggcactgtggggtcatccaagtacccattggtagcttctccttctccattggggttccccacatactggccaaggaccacattgctggtttccacctctgagatacatttcaacactttgacctgggagaaaaccaatgtagaatgggtgggcccctcagtcacagggagggtgtagggaaatggacatgagcccagtgccttgtcatagagtggcctaccataggcacagctgctggggaactggcagaaatgcctctctacctaccttctcatcacggacatcatctgaatctgtggaggcaggtttttccatggccaccagacacaacatctgcaggaggtggttctgcataacatccctagtatcagaagaggcagatactgtggtcaagtgccacttccagggtgggaacaagggtatgaccaaattctaggggccctaggattactaaacaaggctttctagtgacaaactgggaaaccttgcttccttaaccctagtgtcttccaggtctcctaaggcaacaaagtagttgctgaccctgggaaccctttggggtttagctggatgggttgaataatagccctcagggtgtgaggatgaactaagttggggtgggatatgggttcttacctgatgatcccaaattcatcaaagtagcccccacgaccctcagtaccaaagggctctttaaatgtgaggatcacacaggcaatgttgtctcggttccagatggggccaaagatcctgttggcaaatctgtgggaggtataggaaagaggctagcgtgggagacattattatggaagggtctgtgaatggatctacccttgggattccacagtatagtggttgtaactgagccaagctagggcctagcaccctggccggtacctttgaggaatctgtctttggggtagtggggcaggtggggctcctcacattgccacccttgccctggtactcttccaccctgtcccctttgcacctcagcaccatgaggttctggaccatctccttgcccaggtagtggtcaatgcggtagatctggtcctcacggaacagagaggagatgtggttcgacagctggttggagctctgcaggtctctcccgaagggcttctccactatgatgcggttccagcctctgctaggagcccccagtcatgttatttcccaaatcttcccccaggaataggcccagggccatgtcaccctgaccctcaccccaggaagcagagctttcatccactctatattctcaggtgacccagggagctctactgactgatatttatccttaccctgcacaggcagcatcttagaagccttcctgctaacatgctgaggactggatcagtttctgggatttgcccaccttggtgctaagggtagcatgactggcacattcttgggtgggcatttgtttccctttttcccatgccagatcctcagtgggtcagaagtagcccagcatccaacagagaagtagacagataggatatcaaggacacagcttcctattagttttactttatttagtttgaaataaggtctcatgtagccaaggttggcctagaacttgctatgtagtcaaggatgaccttaaactcctgattctcctgtctctacttcttaagagctgggatcacaggcatgtgccatcgtgtctggcctccctcattggtttttatattcttacttatttaatgtatatgagtgctttgtcttcatgtacattggcacaccagaagagggcatcacatctcattatagatgttgtgaaccaccatgtggttgctgggaattgaactcaggacctttgaaagagcaatcagtattcttaaccattgagccatctctgtagcccctggttttatattcttgagataaagtcttgctatgttactcaggttggcttggaactcaagggctcaaagagtagtcctgcatcatctcttgggactagggactattagctgggactacagttatggcccaatgcaactgacttctattggttttatttgttttttaaactagctttttctgagacaggttctttttttggtttttcaagacagggtttctctgtatagccttggctatcctggaagtccctctgtagaccacactggtcttgaactcacagagatcttcctgcctccagagtactgggattaaaggtgtgagctaccaccaccggtgagacatgttcatactatgaagactaggctaactttaaattcactatgtagccatgccaaccttgactacatagtgatcctcctgccccttgcctcctgggattacatgtgtgtgccactataccctgcttagttttttttgttgttgttgtttgatttcactctgtatttcaggttacccttgaactccaactactcctcttgcctcagtctccacagtgctgggattatatgtgtgagtcaccttgcccagatttccattgattttaaaagagcaggttcctttctttgctgttcacaacagagcactaaagttgttttctaaattcaaaaaacgaaagaaagatggcgttcagtctgcagtggtctcttataaaacaacactgcctcctggtgggcctgctggggatctgaaagagacagagagagagagagagagagagagagagagagagagagcgcctgcgagcctcacaatgaacagtgttctatggagcaacactgtcatcttgtggtcagtggaaactgttccaaggggccactattttgtagtaagagccttggaggctagaagctgctgagtaagtatatgtggtaataacaaaggctgttagaaaactctagtacttatagcctgttcccttttttgaaatgctaatccatctggacaacaaacattcagcttttcagcttgcctagactggcttgacctgggtttagagtagcagaagcaagagcaaacagacaggaagggagagagaacgataggccttacgtctgactcatgcaggtctcttgaatgttcttggtgacagcttcatagactgtggggggcaaggccaggtagaataggcggttggcctgcatcccctgatgcagggcattcatgtggctgttgaggtgcttgtaggaggctggatcatcatactggccagccacataggagttacgggcaaagaactcctccagcttgggtctttcctctggggtggcctgggagagatagacagacaggtaaacgccagcttctacttctctcagagtctatacttgttcttccctaaggagtgaaggatctcatttttgtataatgtcttgctccacagctaaattgggtttctcttgaatcaactgtcctggctccacaagtacaagagtttccttcatcttggtaactttgtgtacccatggggatggggctgagacatacagcaggaatactgtatgcaggtggggcaaagtactggtatagtttgcatatctttagggccctcatgcctagaacagaattctgatttcaggaaactgacttgagagaaaagaacgttggagaaggatgtctctctaaaattatcacagcaaactataggtgctgagaaaatgccaatatatagcacatttgccagggggaagaggtacttggaggtacttccagctgctggcatgacttagtgtggcaccagggcacagcaggatggagccagagaggctgggtcagagtggagctgggaaacagatctgaggctgaattgaccatattcttctgtctttgttcagaagtcacagaaaaggtggcataagtaagaggacacagctcttaagtggttggtaagggagaacaaggatgtgaggtgtcagagcttgagtgttctgggtagccctgcctttttgccagtcaagtgaaaagtggggaaggaagtgttgcttatgatggggggggcggcatttcctcatgggctgcctggagttagtcttgctgtggggtaggggaaagggcaaaacaaggctctgggatactccaatgtcactcactttaaagaagggctcactctgcttgcggatgtcatccactgtgagtcgggagcgggcatagcccacaatgaaggtgtcttcgggtagaaggccatcccggaacagccacctaaggttacaataagactgttttcaaactgggtagggaaggtcaaagcctatccctggtaaagagttttttgggggacaggatagtgtagacatatacctaccagatagtgggatagatcttcttcttggccaggtcaccctgcagcagaggaaacgtggtcagaaagagctgtcatgacctagatcattccccaccactggtaaaatgcgtcctcatttagggttaccactcagctacagatatatctattatgctcccatatatcatcagagaagctcagaaattcaagcctgccccagccttgtaccaatacaggtaagtagatgagtctgctgggtgcaagatgaaaacctagacattgagttcattagaacttaagaatgataaaggcagcacatacaacaaaaacaaattctgtgagatatgacagatgtcacattagcataaaagggctacaaagtaatgagatggtcattcaattaatgaacttagaaaaaatggcagcaggccaggcttgatgcagagtgtggtcttcgctcagtaacaaaggccagatttggtggcatgcaaccttataaccttccaacatatagggagacactattccaaaagcccctcctccagaattttaaaacagcaaaaaaaatttataaggaagcaatgaaaaaatacaatgaaaaaattggggttggggataatgctcagtgactttggagaagtcagattctcctttccatccctgcagtaaaaaaaacaaaacaaatggaaacaaaatagaaaattaacaaaagagagctggaggatggggaggagaggtgtgaattgtcttctggatatgacatggctgtggcacacatgaagaaatcacagcaactgtggttgcttgtagaagatatgcataagatcacgccagtcaacatggcagcatggagtgtgtgtgtgtctgtgtgcgtgtgcgtgtgcgtgtgcgtgtgtgtgtggggggcgttcacaagctcctatccctagctaaggatctattggcagcaaccataaggttgctggggagtataatttttcttcatgggtgtggctcctcgttgctcaatgagtggatgatgaagcactaactgaacttagtgggttataaaaaagaaaagttgggagggtgaggtggaagggggctcaggagttagagggacaatggaggggtgatatgctttaagtattttgtatacatgtatgaaaatctcaaagactaaattaagaactcaaaaaatcaaaccaatataagaacaacttccccaaataccaaaccaaacaacaaacccaaacaaaccaaaaagaaaagctggcgttggtggcacaggtctataattccggtacttaagtggttggagcaggaggatcaggatttcaaagccagccagaccctgcctcaaaaactaacaaaacaaaacaacaaaactaataaaaatcccaactaaaccaccaccacaaaacccaacaaaaacctagcaactgctgggcagtggtggggcacacctttaatcccagaactctgtatagtcctggctgtcctggaactaattctgtagaccaggctggccttggactcagagatctgcttgcctctgtctcccaatgctgggattaaagacgtgtgccaccttgtcctgcccatgttagtcttaaattcagcatgtagtccttgctggcttcaaactccaaacaatcgtcttgttcagcctttgtgctgggattacaaacatgtgccaccatgttcagcatgaaggacaaatgtctggaaaaaatccaacctacaatataaaggagcaaaagacctaagaggtggcaatgactagagacaacccctggcctggagagcactgccagtggcttctatcataatcaaggaaatgaaaatttgagtctgaagcaaatttcccctgaagacagaagaaagggggagtattcctacagccactctgagaccttagttctacaacttgatgacaaaggcagatgcaaaagcctttctatttactggctggttggtttttgagacagaaatctacctgcctctacctcctgggactaaagacatgcaccaccatgcttgcctaaaatgagtagctgggattagaggtctgcaaaattaggccttctgagaaagctttacatatttctgtgtattgatttttaaaatacagcaactctgttaagttcagcaaatgtaaaaaattctatttgagattttttaatcaaagacagaagggaatctctttaatttgatttgggacatctatcaaacatcctaagaacaccatacaccatgtggtattggctacttttcttgttgcagtgacaaaattcctgacagaaagtaacttaagggataaagggttcattcaggctcatagtttgggggtacagtctgtcatgtcagggaaagcatagtgataggggtgtgaagtactttgtgttcacagtcaagaagcagaaagatgaatatggacactcaactcactttctcttgttttccttttgttcagccagggacagcaaccattagggtgtactatgaacattcccggtaggcctctcttcctcagttaaatctttctggaaacatgatcatagacacacgtctgggtgtctatgaggagatttcttaatgcctgctattgcttcttttttgttgctattgcttctttagtcagtcttaaactagaagtccttgccagtatcataagacaagaaaatgaaaatgttgtaaggtttggaaaaaagacaaaaacttattattagatgatagcttgtttattgagtgcaaacttgtatgaccactttggaaataggtatggaggtttcttaggaaaatgggaatcagtctacctcaagatccagcaattcctgtcttgggtatatacccaaataatgcacactcatacaacaaggacatatgttcaaccatgttcatagcagcattgtttgtaatagccagaacctggaagcaacctagatgcccctcaactgaagaatggattgagaaaatgtggcacatttatacaatggagtactactcagcagaaaaaagcaatggaatcctgaaatttccaggcagatggatggaactagaagaaaccatcctgagtgaggtaacccagtcacaaagacaaacatggtatgtactcactcatatgtgaattttaggcatagagcaaaggattaccagcctacaatcctcttcaccaaaggaactaggaaacaaggaggactcttaagaaaagaatgcatggaccccagagaaggggaagggaacaggatctcctgagctaactgggagcatgggggtaggggagagggagctgggagaaaaagagggggagaagaggaggggagaggaggaagtggggtaacaggaaagttgagttaggggaagaatagaggagagcaggatgagagataccataatctaagaaaagaatgcatggaccccagagaaggggaagggaacaggatctcctgagctaactgggagcatgggggtaggggagagggagctgggagaaaaagagggggagaagaggaggggagaggaggaagtggggtaacaggaaagttgagttaggggaagaatagaggagagcaggatgagagataccataatagagggagctattataggttcaaggagagatctgacactagggagatttccagagatctaaaaggatgacatcaattggcaatctaaatggagaggctaccttaaatgccctttccctataatgagactgatgattgtcttaaatgccatcttagagccttcatccagtagctaatggaagcacaagcagacacccacagctatacactgaattgaactctggaacccagttgcagagagggttgagtgattaggaaaggggtcaagaccgggctggtgaaacccacagaaatatctgacctgaacaagggggagtgtatggaccccagactgatgtctgggaggccagcataggactgatccagagccctgaacaaggatgtcaatgaggaggcctcagtactctatggggcctttggtagtggatcagtatttatccctggagtaagaaaggactttgggagcgcatcccatatggagggatgctctctcagcctggacacatcggggagggcctaggccctacccaggatgatatgacagactttgggggatcccccatggaggaccttaccttccctgagaagcagaagggggatggggtgggggattggtgggggtgtaggaggaggggagggagagggcagggattgacgtgtatcaggcttgtttctaatttgaactaataaaaataatttcttgaaaaaatatctcaaatcaatctacaaagtaatcattagagttaatgagaatttagccaagttgctagattaaaaaaagcaataggagtaggtagagatttcttaggatataaagtaataatcataagctagcactgtactgcagcctgtaatcatagcactccagaagtggaggtaagaggacttcagggttatccttgaataaggacttcagggttatctttggatacatagtgagttcaaggcctgcacagagagagaggtgataggagaggagaatgatatgaaaatatgaagggcatatgtgaaactctaggttcaatttccagtattatgaaacaaagaaaagaagaaaggaaataggcaggcaagcctggaattgtggccatgtgctttgcatgtgcatggcccagattataatccctaacatcaaaaagacaagctgcagccttagagataccattcactaaacttatctatattcagaatatctaaatagctcctatgacaaaaaatgtaaaacaatttaactgacatgggtaaaaggcttggtcagatgtttcactagaaagaaaatgaatggccattcaataatacatggaaagtgttcaagatcatcaggtgtcaaaaaatacaaattgagcaagacaccacttcatacttattagaatgattgtaatctaatgattaacagttggacatgttggtacatacttataattcaaccacttgggaggcaggaggaacttcatgattcaaagactagcctgggcaacatagtgagttctaggctaacctgagctacatggtaccttatgtcaaatagaactccctccttccccccaaaaaaactggtgtggacctcacagactgtggatagaaacgtgcaatagttactaaatctaaaacagcctggcagcctcttatcaagtgaagtacctactcctatcttatgacccacaattcctccactaggtgttctcccagagaaaaaagcaggcagccaaccatccaaagatctgttcgtgaatgattgtggcagttttaatttaaaatatcttggacccaggtggtggtagtgcacacctttagtcccagcaatcgggagaaagaggcagagggatctccatgagttcgaggccagcctggtctacagatcaagttccagaacagccagtgttacagagaaaccctatctcaaaatgaaacaaaaacaaaaaacaaaagcctggagatgctcaaataaatcagcacacagatagacaaactgtatatttgtattcagctactcaggaatgagctaccattctaccattccaaaaaatgttggcaaatctcagatacattatgctaaaccacagaacctagacacaagagactgaatactcatgggttcacttaaaagtccaagaatgggcaacatgagtctattatgacagaactcaggtgagtgtttgcctggggaggtagtaaactggctagcaggggtacctaagaattgtgtggatacctaagaaatgtcctaaattaggccatcaacagtacagctactatgttttaaaaaagattttatttatttattaagtatacagtcttctgcctgcataccagcagagggtaccatatctcattcaaggtggttgtgagccaccatgtggttgctgggaattgaactcaggacctctggaaggacagtcagtgctcttaaccactgagccatctctccggccccactactatttatgcactacaatgtgtacaaagaaaagagcgtaaaagcagagggatgctttttgagtgtaggtttttgctgtaattttttaagactgggttttatgtgtcctaggctagcctcaaactcattatgtagccaaggttggccctgaactcctaaccctcctgcctccacctctctggaattacaggagtgtaccaccatatgttttacattgttttaagcaagagccttgttgtgttgatagtcttgaacgtcttccctgaatctcctgcttcagcttcataaggggtaggacttcagatgataatgctctgtttcttctttttatttaaatatttattttattttaattatgtatatgtgtggtggtatatgcacactggtataggcacctatagaagcaaaagaggccactgggttccctggattgtgagttacagggagttgttagctgcctgatgtgggtgctaggaaccaaacttgggtttgagcaaaagtaacaagtacttttttttaatctttccagcctttctttctttctttctttctttctttctttctttctttctttctttctttctttctttctttctttctttctttctttcttctcccctctctcctttctttttttggtttttcaagacagggtttctctgtatagctttggagctttcctagaacttgctctgtagaccaggctggcttgaactcacagaggtccacctgcctttgcctcctgattaaaggtgtgtggcaccatcgcctggctccagcctgtttcttaaagtgggagaaatttacaagggtgtgccaagtttgtgaaaagttgtccagccacacccttaaggtctgtgttctttttttaaagtagaagtcatctttttttttaaaaaaagatttatttatttattgtgtatacagtgttctgtctgcatatatgtctacaggctagaagagggcaacagatctcattacaggtggttgtgagccaccatgtgattactgggaattcaactcaggacctctggaagagcagccagtgctgttaacctctgagccatctctccagcccctgtgtccttttatatatatatattccaataataattataaacatctggggcttagtggtaaagtgcttagcaagcatgaggcagtgggtttgatctctatcattgcaaaactaacaaaccaaacagcaccccacaaaacactataaatattaatagatacagattaactgcttttatttactaacaccaagtagttggcaaaataagcaatttaaaataagaaatttaaaacaataccatttacaaaagttagtattataaagaacctagaaataagttcaatagaatactattgtgtgggcttacagagaaaatgatccaactccattaaaaatgacctatctaacaccctccatgctccactctaagccaatgtacacacccagttcaatctccagtaaccatcaacagcccagcatgctttcagttcgtaccttgtcaaacaaagtataagaaggaggggctgaaatggctaccaagctcttgaacaatagagtaggtatctgccctttcatctcaaactctataattaggaatatgggatgggtgcaaactcacactacacagggtactgctactacatggggagaggtgagcatctctgagtattaaggacctgaatatttatgcaaaagcaatttgttgaaacttttacaggcatatctaattaaaaattcaaaacaccactccatctaacaaggtatttcggcactaatttcccagatgtttggaatgagttttcagatggagttggtctaggtggcatgaactttgccaagtttaaacaagctatgcagaatgcagccagaacaatactctttacctgggcccactgtgacctgcgaagatgctgggctccatggatcaggtacctccagaaatcgaagtgaactgctttttcctttagcacaataaccaataggtaacttcctgccatcacaagtggactaatacacaacatagcccatgctgactagctctttaaaatgaagaggtggagctggagtggtggcttggtggttaaaagcactggatattctttcacaagaccctggtttgatttccagtacccatatggttactcacaaccatctgtaagtctagtttcagggggatctgataccctcttctgacttctaagggcaccagcactgcaacttgtacagacatacatgcaggcaaaatacccatatacataaaatagataaaacataatcaaaacaatgaagagtcagctgggcgttggtggtgcacgtctttaatcccagcactcgggaggcagaggcaggtggatctctgtgagttcgagaccagcctggtctacaagagctagttccaggacagcctccaaaagccacagagaaaccctgtctcgaaaaaccaaaaaaaaaaaaaataattgaagagtcaatacaaccttagatacaaacttcaaaatgactgagacagatatagtagtatatacctctaatcccagtagttgggaggctgagacaggagattaacaagttcaaggccagcctgagaaatgtagtaagcccctgtgtaaaaaaataggggcaaagggtggtggggggaaggctcaggctcaggctcagtggtagatttgcttagcatgcaggaagccttgaggtggtatgtcctcagtaacatattaacaaacaaaagagattgagctatgtggctgcattgatgaatacatttctataggaaatggcagttcttgataaggatgtctatggacaatcagaatttccagcggcttaaatatttgtcttcagaagttttctgagtgacaggtccatggaagcaagtgtgtgtaggtcatttctaggttctactgggttcccaaaacttctacaggggcctgttaccaaactttggtaacctgtgttggcctgagggagcaattccctccactcagtgcccatgtctgtcaattgttcaggattaaagttttgagcactgtggagtgggtccactcgataactgccatcttccatatgaacttctggaagcctgagcccaatggccaccttgtagccccatgctatgacgagtatctttaggaaaatgtctaagacttgccagctgggctcctattgttctgtcactccctcatatgatacctagtatggccatctgagtggcctacttgctgtcccctaagccactttgcttggcacagcttttaccctgttgtgccagatggctgtccttataggtcccacaaaggtcagcttagacaagccccattctgggccagcatctcccctgaggatggctcttggttcctcagagtaacctcatggtctgtctctggcatctctcatcagtgggatgtgggttacagctcatgttgtcctggtctctcacacaccagaaacggctggcttgctgggaactagacactgaaagaaacaatgagaacactggcctgcaaacttctctaagcaggcagtgtttgcttatgatcaaattccaacagactgggaggaatcaggacaaactccagccaatgtattggtggcaagggacaggtttgctgagtcacagttgccccacacccagagctgtttgttcttgttccctttgggattaaccagacatagaacctgctctccttgttttagctcagtccctgcaaccgacagtctacctggcttcaagtcactcaagggaggtgaggtaggactaaggacagtggaggcgggaggcagccgttcttctcagggatgggggggggtgaccctgcctttcctgctggcttcatggctctccctgatctcctcttaggtaaggaacatgagaagaactaaaatctaaaatgtgtgggagtgggggcaattagagaggtagctgaaagtctctcatctttgccaccccctcacattgcccaaggatcatgacaggggaaggagctacctaaggacatgtggtgacttaggagaattagggcatgattaagatctccagccacaactataggtcagataagggcaaagagccctgagtaccaactggcctatggtcagctgaggtttgacctcttgttttataaaccgaaaccacagccaagggttgttgtggatgagggacctacctagcttcccaaagtagagttctgggctgtgactgaggatgagctgcctttcagctactggaatgagatgggggggtgtgttagggaggtttgggctaaaaaatctaacaaaaggcctccttcctacacgagtgactccacgagtcaccaggcttttgggagaatgccaaggtcatcatgacacagcaagaatcttaccagcccaagggagaagtcaattctgaaatgactcaagaagagggatggacttggagtgccaggtcactcctcatacaggcctgtcagcaggatggaccttgagtacccacagtctatggctatcacacaggctaggtgggaaaactgatgtatagagatgagccctgtagtgaacccatctgcccatgtggactcccagacctataccttttcttctgcataaggggaaaagcgtcactttctagcctcaccaaggtcttattgggtggggggaggtgtccttttaggttcacagatccttccccctaccagtccacaaggaaaaggttttctagagtggggcagtaaggatttctgtttccttccttgtttgggtgggagtcctgagaagaggagtggctacagtgaggcagcataagaatgcccctaggtaggaagctgggtacatgggtaagactgggcaaggacctggggaggaagaaggagtagagggcactacttggattcaacttgtcctggtgtgttccagtttcctaggcttggggcctggcagccactggattccttttagtttctagatcacactgagcttgttcccaatttagaggacaattgccctctaatcctcaaccagccttgctttctaggtccacttgggacctgtgtgctgcaggggtcttagtacacaagagaccatttgtgacttctgtcacatacagctgcctaaaatcctgttggtttgcttgctcccaaaagacactgtccccatgaggctagggactgaggctgttgtggattggaggagacacttgattgctacattgaatgaatggagaacttgcaggtatcctagatcagcactttgcctgcctcatgcattcagtaaagtgtcaggcaagagatattctgggggctgtcccggcacagggtctatttgtctcaggccctctgagaagaacagagaaaaaaaaatgatgatcttcagcaaacttctctttcttccccactcctttctgctggagctagcagttcacatttctattctggaagcctcagttctcactccagagcagaggagagcaaaggggaaccataccgattgcagtgaaatgaagttgctcaatttcaggctagaactcacataattagtctaggataaagccagaggctgtctggcccttgtttgttagatgaagactactaatgttcagagaaatggagacatttgttccaggtcacacaacaagctatcaatgaggtatctaagagttcaggtctgccagttgtaaactatctttgatgtttagattattattgttgcaagcttataaaagcatgggtggggcaggggaaatcatccttagttactttctcttccaggtggtcatttagactgaaggacctaatagtcagagtcctatatgctaaggtttgtagttgatacatgtatgcatggctcctttaaggggactaggctggtgctacggctgagggtaggactgctgtactgtgtgttccaactgggtacctctgttgggtcttacagttatagggagttaggggacagtgccttgggggtgtctctcccttgccctttcagtggctgagcccttctcctctgtttctgcattccttttctaagttttctcactccacttttgctctgaaatacaaggctgacaaagaacacgtctggcaaagggggtggcatgttctgatttcctcttttttgatagtaccgggaattgaacttagggcctcatgcataagagcctagtactttaccactgagctacagccctaacccttagtgggtggcaatgctctgtatgaacaaagaaccacagagttcacccagcactgaggggcccaaagtgtgcaaggtgctgagctagtagtggctaaccacccactaacacattagctctagtgaagttcttgctcaaggttacacaataagttaatagtgaagatggtaacacgagggtgatcagattctagggttaaaagcaagcaattgagtttaccttttccacaaaaccctggtcactgaacatgccctgcttccacaaagcacatgagagggtgccccacctgccccagtctcactgtgtaccatcatcacaccacccctctgactacgcttctgttcttcagtttttcctaacagagcatattggtagttgttttagttagacaactgggaaccaggtggaatcaacagaaatctgcagtaggctctggaagatgtggtaaagagtaggtgtttgcctccagggaacttcatgcaatagagagaaaagaggcagaggcaggacctcagatcctttcactgaaagcaactgtaacatttgtcaaattacagatttggaaaacatatagactgaatagcacttcctggttgcacctcagtttttttttttccatccaggaggaagaagttcaagtagatggtgctttagaacttgcatgctccaagtctggcccacatttaatggctgaacatagatttctgaaaagccttgcaaatgagaaatttgacagaagtacatgatgtacagcaggtactgactgctgtgatgatcaggacacacaggtgggaacatatgccgtgagttcaaattagaacctgtgtggccccttagcagtcagttgggaaagttcaggtaaagagagagaagtgccttgcaaaatgctacatttgatttttttacactcagggcctgaggggagactcaccgatgcacccatgatgataaatatatgtgtatcagcttggtggaaggcatcaccctggtacaactcttccctcaggatgccacacacctgggtccggctcagggccacctgctctgccatggtgttttctggtggaagaaagactcattgataaggcaggagaacagaagagcattgacaacttaaccttatcagaatcagaaactgctgcttctgggctccagccatatcctatgttgtcttctctgggggctgtacattacgaaatctctataagcattaatggaattcagctagggaatccactctgggaaagcgacgcggtcagagcatcgcactgtgtctggggccatcgcactccagtctctgccagaaacgccacaatgaactgagcatcttttcattgtgcagatgatggagttcagccccagctctctgctggccaagctaaatgatcccagaaagacccttctcttctaaaagtctagtcctcatgggcctaatgcggggaagtgcggggtacaatgggatgggttaagacctcgtagatctttttccatatccaagcataacaaatagcgctcatcaaagggacacgcggctcataagcgggaagcacatccctccaccggtgtgctatcagaccaccccctttacctgtgtttagttgctgctgccaaacaggtttacagttctggagtgcacagctcgtttccgggggctgcgcttagctggctcgtttaacgcaggagggcgggggctttgtgtgagctgccccacctcaggagcggtgagggaggggagagtagcagaagtaggtgcgcacgcatcccttgtcagccccaccctgttggccgtccctgctttccctgctccgcgatcgtgatgctttgctggcacagatacagctccgcacagttctcctgcgtccccatcgcgctaccccagccatactttatggtctgttttccgatggaccctcgagtccctgcgcactcctggatgaccccacttccgttagcagcatagccacgcctccccttgcaatcggtttggcgtcctttagcagcttcttctaggctttttccatggtagggacctggtggcagagagcccagtgacagaaccagactaaaactggggtgtttcattgcgaatgcgacgccttgaaaatggggtggggacaactgtgggcgaggtgacacacgcctttaattccaagcacccgggaagcagaggcaggtagatctggatagctaggagagagaccctgtatcaaaaaaaaaaaagtgtgtaagtgtgtgtgtgtgtgagtgtgtgtgtgatctttatcagtgaagagcgttgcgctcttcggttagccaatgcaggctggcggtctgaggcttctcttcagagtgggatgcagcactattgtggcttcgcagctccagttaatctcctcgacttcgagtctgtgttttacttccggatcccacacttacgacaccgnnnnnnnnnnnnnnnnnnnnnnnnnnnnnnnnnnnnnnnnnnnnnnnnnnnnnnnnnnnnnnnnnnnnnnnnnnnnnnnnnnnnnnnnnnnnnnnnnnnnnnnnnnnnnnnnnnacaggtgtagtcctcttctccaaagatagggctccatcggtggccattatgcagcttccgaggctcctgagcccccttccccccaccttgggcccagtttgttctgttgcatgctttagcatgctttttagagcatttattcaagaagtgcagattcgcgacccagcttacttggactgatttctgtccttccctctgcttatctgtcgcctaagggcttggccccaagtgctagaactcttagttcacagacatttttctgttgatgaaactttgttttctgaaacagcatctcgaaatgtaggccaggcagaccacgagcacaagattctcctgcctcagctttttcaagtgtaccgactttgcctttgtttttgaagggttcacgataaaagggagaaacagtcaaagttatctttgatgtaactggtcccagtggggtcaattgattgtaaaaggcaagggaagaaagcatggtgatctgtaaagagattattgcagtaatccatgtgaaggatgatagtgctgtcagccttttattactgaaaactttaaaaatgtacaaaagtagaaatattaacatagtaagttccatgtacacatttcttagttgtctctatcaactcatagctaactttaattcacagcccttacagtactctaccatgattttttttcctctttagaaaagatgttattttatgtgtgtgggtgttttggctgtgagtatgtatgtgtactacatgcttgcctgttgctaaaggaattcaggagaaggtgtgaggtccccttggattggagttgcagatgtttgtgagccaccatgtgggtgctgggaactgtctctgcaacaacagcaagtgctcttaaccactgagtaatcatcttttttgctccacccattataattttcaaaaacagctttcttgagacataatttgcatgctgcaccattcacatttaaaaactaaaaatatttactatttgtgtgtgtgtatgcatgatgtgtgtggagtgtcatggccagaatgtgttctcaggtttccaggcttgcataccaatagttatccactgagatgtgtcacttgcccataattcaaaatttttggagagagtctcatgaagatcccttctttttgagtttctcatcctcctgcttttacttcctaagtactaggatttacagaagtacaccaccacatctggctacaattcacgtatttaaggtgtataattcagtggtttttagtgggttcataggagtgtgaaaacatcactaattgcggaacattgtcatcatccctaaaagaaatcctaaataagaaactccaatccacctcatttctctaagtaaccactaaactactttctgtcaggatttacatgttttggatatttcttatgcttgtaagtatatacagtatatagcttttagtgacatttctttctcttagcaattatttggagcatgtgttcttgtttttgtaacagattttgcttattcatcagttggtggacatttggattgtttccactctggctgctttgaataatgctgctgtgatcatttatatatggacatgtgttttcatttctattgggtttatccataggtatctcttttgttatgcagtgaatttcagacatgtgagtgtttcattatgtatctctttcagaaagtactctcaataaacataactacaacaccatgatcacacttaaaatacctaatgttatagtgtgtcttcatgaattaaaaagatgggcaggggggaagataaaggaacagaaaaactaatcgaacaagcaagcaaaaactcagaaatgctcaagttttttgtcctgatagttgggggatggatttgttttcaactgatagtaagggaagttgtggatagaagtggatttgggagactcacttttttgggtactgctggggatccagagtctggtgaatgtttggcaagtactccattgctgagatatacttctagttctgggaaattaattttgacaagacctctttttattttaaaaatatttaattttagtttttatttgtgtgtgtgtgtgtgtgtgtgtgtgtgtgtgtgtnnnnnnnnnnnnnnnnnnnnnnnnnnnnnnnnnnnnnnnncacacctctgtgtgtgtgtgtgtgtgtctgtgtcagagaccagaagagtacattggatcccctggaactagagttatagatagttgtgagctgctcaacatgggtgctaggaaccaaatgctctggaggagcattgagtactcctaacagttgaaccatctttccagccccttgagtagacttcttcttcttttttttgagtagacttctaagtatccaagtagttttatatttgagtctgcaatttaggagtgagaactgtttgggttttatcaatattaagatttgggttaaagccatgggactggagagaattactgcaggggtgaatgtgttttggaaaaggccccaaggcatctcaacatgaaggaatgggaactcagtgaaaaggcctcagcacattcatcctttgagagagtgagggacactagaataggcttttctggaagctggaggaaaaagcaggtgaagaagagggaagggtcgccgggcattggtggcacacgcctttaatcctagcacttgggaggtagaggcaggtggatctctgagttcgaggccagcctggtctccagagtgagtgccaggacaggctccaaagatacacagagaaacactgtctcaaaacacaaaaccaaataaataaataaataaataaataaagaagaagcagcagagggaaaggtcagctgggtgagcttgggcagatggatctatgggtatcaacacttttagtgtaaatagccaagattcttcagtgttacaggcatcctaccttactgaaggtccacttctggaagcttgtattgagattgtcctcttcctggcagtcagttttaggcaggatttagaaagtcttcaggttagctctgcccagcatgttcttcatctggtttataaaccaacataagcagaccaggggtcatttgtctcagactgacactgcaagtcccactttcaaatttcttagcatatagaaaacaccagaggtctcttctatcctcccaaggaacactcctcaggtacaatgtggtctcctaaattctcttaccaagtgtttgaatttcctgtgattcctataagaaatgaccacaggcctggtggcttaaaacagcagaaatttaacatctcacagttctggaagccaggagaataaagccagagggtcagcaaggccacactccacctgcaaattgtacaagagcatccttcctgtgtctttcagctgctagtggctcagttgtttttagtttgtggttacatcagtctaatttcagcttctgtcttcccatggctgcctccctgtatttccacctgttttctctctcttgtctcttttgtgtgtatgtgaggaactgggaattgaacctagggccttgtgcatgctaggtaaatgctctaacactgaactacattcccagtcctgtttcatctgtctttcagaagggtactttttattgatgtcatggccaaaccatgtaacttaggatgatctcaatttgagaggcctaatatttgtgagacagattcttactatgtagaatgggctggccttgaactcataagagatttgcctgactctgcctcctaagtgctgggattaaagaccctgcttggcttgagatccttaatttaatcacatctgtaaagatccttttttccaagtaaagtcacatttattgggaaagaggacaagctatgaagccatggtgggtaaggagaaaagtgggctatagggatcagtgggagtaggtttgaactttcttgggacacagcaagcttttaggtgggaggggaatatagttttccttgggagagagagagttttttcctaagatggagtgtggcctgctcttggaagtgtgtggccaattccactgagaggaggtctttgagttgtaggattaggacatggatatatcaaccattctactacattaagtgaggagatagaattcccaaatatgctgccctttccttccacaaataactctctcattggaatgggaatatttgctatgtcttagatccaaactccacttttgtatctgattccactagataaaatgtacagccttttggtatgaatggaagtctagggcttctgtatagattgaatgcattgtgctggttgacagaactctgctctgtgtcatgcacttctactgtctttcttctagacactgccttgttggatgagtaagcacctctggaagaatcagttgagtgaaatggtgcagcccagtggtggcccagcaggggaccaggacatgcagggtgaagaatcttctctggggaagccggcaatgttacagctgccttcagagcagggtactcctgagaccctccagcgctgcctggaagagaaccaagagctcagaggtgaagttttcactgtgagggaggcatggagtaaaaagtcaggaggggcctggcacagtaaggacaaacttattttcacttgcaccttattattggtagggtatggatgaggttatggtgttcctaggaaacagccgtcatttcaaacttagctatcttcctgcttggtttcaggtgggattctctgtgaagattcacatatagggaaaaatgtggttcagggccagcaccagggaagggaaagggaaagggggaaagaggacaagctgagaagacatgtgggtagtggggaaagtggggtatagggattaatggtagtaggcttcatctttctcaggacacagcaaacttttaggtgtgagggaatatagttttccttgggagagagaactttatttcctaagatgtagtgtggcctgctcttggaagagggtggtcagctctggtgagaagagatctttgactgtgtcttctgtactggcaccctgtctccttcatgtcaccctcattttgtaaggtaagcattaactgtttttttgattttcgagacagggtttctctgtgtagctttggagcctatcctggcactcactctggagaccaggctaggctcaaactcacagagatccacctgcctctgcctcccaagtgctgggattaaaggcgtgtgccaccaacgcccggctgttcttgaatatgcaactgaagatgatgaaagttagagatatttttaacttgtcctttctgtgcttctaggctgtagccagaaactacacagtgaaatttaccttggggattgtctccctactttctcaagtctgcaggcatgtttagggccccctgatcctgaagacatagatgcaggcctggcagaactaaaactgagtgctccaggctagggataccctcaactgaccagaatataaatgtagcacataaagagaaagttgtatttgaggtatcccttcaagtgagaatgatgtgtttagtaatgcattgcagacacttgggggcatatcatcagtggaattggctggaaattggtttgactttgagaaaggctgcctagtatttcaggggtgccttgctgtcagcactcacatctactttgctgttttccctgtccccagatgccatccggcagagcaatcagatgctaagggaacgctgtgaggagctgctgcattttcaggtcagccagcgggaggagaaggagttcctcatgtgcaaattccaggaagccaggaagctggtggagagactgagcttggagaagcttgacctgcagaggcagagggaacaggtcttaaaggatttggagcacctgaagaaatgccaacaggtagctgttgggtaggcagcccttctgttccacctgtgtttgaagaccataatgacattcatgttctcataggaggcatgttgttggggggtcccccaagacctcttccagcttgattgctgggaatactttcagaaccaagagaagtcatcacactcactgttagtttattacagtgaaagggtccacattaaaaatcatcaaggtacaagacatgtagggcaggagccagttgagtccagatgtaagcttctcagggaacagtggttttgttgtgagcagtacgggcagtatacatagagcggtgtcacccaggaagcatgtctatgtcttgggagccagggtttatactggactcatttgtgaagtcacagagtgcttgggcacctgacccagcttgctcaggtcctagccaccctgaagtccagctggtaccataccatatattctaaggccctcacttacaccttggcatcagctcaaacagcctggtaggaccctaggcccctgataaaccaaggtactctcattaggcaggatttctcggggctcagagatgatctccaagtgcagttggagaaagtatttggtcccaggcctgtaagttggccttgtattgcactatctccaaaggatggtgtccttagtgtgggatgagaggatatttctgggcctttttggactggctggtttcaggaccctggggacagcagttgaacaggtgttgtacctcattggagggttaatctggggagaaagggtagggaggagctgccatagttaggtttcaacagtgtaaggctaagttcacaatgctgctggaagtgccctgtcaaaacatttggttcctatctgggaagacagctgcaaggtaccatatactgggggcttagacaacagagattgtccccagttttggaggtcagagatctgagatggaggtatgggcaggtggattcctcacaagggctattctgggtacttcttcgagtacattatcagtgttggcaatccttgggactccccagctctcttgtcacatagccttttccctctgtctcttctcttaaaattattacattttattttgtgtagtgtgtgtgtttgtgcatgtactcatgcatctgggaatgattatgccatggtgtgcgtatgtaggtcagaggacaacttgcaggagtcaattttctctttctaccatgtaagtcccagggattaaactcaggttgtcaggcttcatggcaggcatctttaccggctgagactccatgagctgtctcacaaccctcctctttttataaggatcctaatgtgaaacataaaggtggacagttgttaaagccatgaaaacagattttgttcaaaaactgataacaatgagagggaaagagctagctgagctctggtgatcagcacaggtgactggatagttatcattttttaagatttatttttatttatgtgtttggatgtttgtgtctgtgtctgtatatgtaacatgtgtgtaggtactcttggaggccagaagagatgtcaaatcccttcaaactggaattctttttttttaaataatttttttattttagaaaaaaaatcttattttacgtatcaattcccccattcccttgctctcccatccttccccactaaccctccccaacctactcctacctactccctaatgatagtgaggccttccatgggggaatcatcaaagtctgtcacatcatttgggggagggcctaggcccttcttggtgtatctgggctgcaatagtattcctccacagggaatgggcttccaaagtccatttgtgctctagggataaagactggctccattgttaaaggtcccatagactgttttgggctcctagctggcacccacattcagagggcttggttcagtccaatgctggttccccaactttatgactagggtctctgtgctctccctaggtcaggtcaaatgtttctataggtttctccagcacggtcttggctcctttgctcatccctcctccctctctacaactggattccaggagtatggctcagtgcttagctgtgggtgtctggttctggttccatcagctactggatgaaggctctaggatggcaaccaaggtagtcatcaatctcattataggggaagggcatcaaaggcagcctctccactactgcttagattcttagttggggtcatccctgtggatccctgaacatttccctagtgccagacctctctctaaacctatactggcccactctatcaaggtatcttgtttcttgccctcctctattcctcccctgtctcagtcttcctgatccctcttgttttcctcccccctcctctatccccttctctttttcctccctccatcccctctccctctgtgctcccaatttgctcaggggttcttgtccctttccccttctttgggagaatcatgtgttcttctcttagggtcctccatgtttcctagtttctctggtggtgtggattgtaggctggtagtcctttgctctatgtctaatatccatatatgaatgagtacataccatgtttgtctttctgtcattgggttaccttcactcatgatagtttcttccagttccatccatttgccttcgaagttcaagattttgttgtttttttctgctgagtaatattccattgtgtaaatataccacattttctctatccattcttcagttgaggggcatctaggttgcttccaggttctggctaatacaaatagtgctgctatgaacattgttgaacagatgtccttgttgtatgaatgtgcttcttttgggtatatgcccaagagtggaattgctggattttgtggtagactgattcccattttcttgagaaaccgccatactgatttccaaagtggtcttacaagttcacactcccaccagcaatggaggagtgttcctttttctccacatcctctccagcatagactgtcattggtggttttgattttagccattctggctggttcaaactggaattctaggtggctgtaagctactagatggttgttgtggtaggaactgaactctgatcttctaaagagctacaagtactcttagccatctctccactcaatgactgggaattttaaaatgacagtaggtactagagtgtggttcaataataagagtatatactttgcatgtgtaaggcctggagttcaatttttagtacttcaaaaaataaggacagaaatagagatagaaagaaaatggaggatttgggcaggggaagggagctgaagtgaatgacaaagggtattagtgtcgatgtgatgaggccagtgtgtttatgagcttgtacaaatcaaatgtatgtttttaccatactaggagactaggagtctgagtcctatcctttttgatgattgcatttcaaaggagtagcactcaggttttttgagacagcgttaggatcatagggaatacatggactttgagagggatacaggaaggagtcatggctggtagtacttactagctttccagcctatatcaagtgttggtcagaatagtctgttcctttaacaactctgagaatttgcaagtaggaaccaggaaggggtctgggacattccaggaatgtgatcttaagctgtttgaaggcatgttaatgtttggtcaaccttaaagtttggctgagctgagtatggtttaatacccccagcattccttccaccatgtaggttttgaagatcaaaattgggtcataggccttggtggcaagtacctttacccgacaattcttcttgctggttcagctctcagtatttataaaaattcagcatcttctctcattttttgaaacttttcacctgttgtatatatggactaggttgtttatttttcttgctgtctttgggtctggtctcccttttcagagtttcaaagagactgagaaaggtttactaccagctgaaagtcaaagttggtgactgggagaggacagatagccattgggctaatgaggctccaatgtacctaggtttataggtgctgaggggcaagagtagcccttagtacatcagctgcttgtaggctgcctcagcccttggggatgccaaaactgggcatcatgggagaaagtagtactgataggaaattcccttttctcttgcagcagatggctgaggacaaggcctctgtgaaagcccaggtgacatcattgttaggggaactccaggagagccagagtcgcttggaggctgccaccaaagaacgacaaactttagagggaaggtgagtggggaggggaagctactccaggaggccctttccagggttttgagtgaggctccaggagttcctctcccctaagagaggaaggactgacaagtcttttcttaaattccctggagccttcaggtctgccttgggagagccctggccagatatccaggaatctagttccacttttgtttccagtatctgaccctttacttgctgtcttagttagggtttctatttctgtgaagagacaccatgaccacggcaactcttataaggaaaacctttaattggggtttgcttacattcagaggttcagtccattatcatcatggcaggaagcatggcagcatacagaaagacatggtgctggagaaggagctgagatttctacatctggattggcaggcagcagggagagatagtgacactgggcctggcttgagcatctgaaacctcaaagcccacccccagtgacacacttccatcaacaaggccacacccactccgacaaaaatcttttcaaataatgctgctccttatgagcctatgggggctgttttcattcaaaccattacactcgggttcagtttattctttaggaagcattgcagggcccccttaaggccacactcacgatctcactatccagactgaagtttatcatggaaaggtatgcagtgggatccaccaaggcagatagtcctaggtaaagaagactggatacattacacagtcactcctatgaaaagcacagagcccccatgaactatttttcattggagactctgaaccccatgtttctattgggagtcagttacattggcatcctctgtgaggcatgcactaatgtttctgactctttgcagaaaagtgagtgtttggaagctacagtgtgacacaatcatgctgtaaatccctttgtctccatatattgttaattgtaagtgttcactacaaagagtcattggtctggtttgatgtttctggttcctattacactattgatactcggccctcactaggactcttcctggatatcctgctgttgccctgtgttgtggagattctgcagctttgggtctgcatgtcaggtccagcagatcataaataggatggatattagggttaggtcaattcataaccctggatctgggcctgggcagctgtagggttggtctgccaaccagtcctcccctgtcctcaccaccagggtgagctctccagcattgctcccggctaatttacctcttgcagcaatgagcgaggggtggcaccagttctcctgctttcacacccttagggttggttctcccacactggcaccattagggccagctctgttgtgttgctcagatgtgtgacaggcggttgctctcccaagtgctgcagctggtgaggggtaaggacagctctcctattcttatgaccgcaggaccagcttctccacatgtctcaggtgttgatgggtgggatgtgggactaccacagataagtaatgggggcagctctctttggctcatagcattggggctgggtcaccatcacctccaaccactgagcagttctgctgtgctgcctaggcaagaggcaggaactgaatcctgaatgctgcagctagtaagggggaggatcagctctcttgtctgttgcaggtggagatgggcgaggggtaaagggggaacatctcttaccacctacattgccacatgacaggcaagtagtggggacagctttcctatgcttacaactttggggctggctcacccacacctctgccaacaatgttggctctattgtgttacccaggtaaggtaaagggcctgctctcccaagtgttgcagctggttttggggaagagcagcttttctactattatgacctcagggccagttgcaggagatgcttcttattttccatcttctggctgccatggtccctttactgtcttaccagaatcagctcttagacataggctagttaggacctgaccccttccccaggctgtcttgctccagccccctcagtgtgttcttttttgttgcatgtcaggatgcgagcagttagtgagcaggttagacagctggagagtgagcgggaggtgctgcagcagcagcacagcgtgcaggtggaccagctgcgcatgcagaaccagagtgtggaggctgccctgcgaatggagcgccaggctgcttcagaggagaagtgagtggctgtaagggttggtaccaagagatcccagagcacccatggtgttttatgccttctggggagttctggtagggactccctgtgaataaaagagctgactttgccttgataatgacagagtcaactattatatgtaaacagaagtattttctatccacattcatagtttatttatatgtcctacacaggttcttttcaccacagttgacatatgctctaggtgtaaggaaagcaaggagccatggtggccctaaagactcacctgggcccacagtgcctgcacaggctctaaacatgctattggcatctggttcagcatccttttgagttttctttaatttagaacagtctccttgcctctttgttttgtgctgaatgcagtcagatgtcattttattgtaaacatctctcctatttattttctttttggtgctagcccaaggttctactcctgagttgtaccctagcccttgttagaaatatcccaagatgtaaggaaaacatgaactgtgtagcagccaaatcagtttcagtgtatccttgcagtcagcaaagcctgcctcagagttgatggccccaggagcctacatgtaatccaggaagcccacatttcaggtcttttatgggacaagaaggaagagggtgaagctgtaccaggcaagctgtggctgtactgggacaaagcagtttcttcagtgacagccccttttgcacaggcggaagctggctcagttgcaagcagcgtatcatcagctcttccaagactatgacagccacatcaagagcagcaaggtgagtgaagaacacaagctagtaagtatagctgccctgggctgtccagggaaaggcttttaccttcttccctccctcctcccctgtcccataaacctggaggggagtaatgtgagtaatgtgagtaatgtgaatgagatctggcacatctaacttttggaagggactctcaaattgcctgacaccgtcattgggctgtggctctgacagtttagagatggccacaaggagacgggatgcatccacaggacatctctagggtgtgtgtgtaggaccttcagatactctgcatggccattccttcgtgatcagacgttccaggagatgttccagaaacatttatttttctctaaaaacattttttgttttgtttttcgagacagggtttctctgtagctttggagcctatcctggaaaccaggctggtctcgaactcacagagatctgcttgcctctgcctcctgagtgctgggattaaaggcatgcgccaccaacacccggctaaaaacatttttatatttatttaatgtatagaaagaagtattttgcttgcacatatgtatgtgtactatgtgtatgcttggtataaataaatgtgagtgccaggttttggcaccaaaatgtaagcgagtgtattacagctctggagctgcaaaggtgtcctgatttatcaggaagccagactatgtagagcagcaattgcacgactgtggagggttagagcacaataggacaactctggaggggaagaaaaacaataggacagctcagccctggagagaaatgtgccctgacttgtcaggaaatcaggttacctagagctgcaataggatagctctggagggaggagccttaacaggatagctcagccctggagggaaagatgtcctgacattttgggaagccaggctacctgaggctgtggtgcagtaggtgatagtttctctgcagaaactatagcaatcctgctcctctcccagagagggccattacagttgagccctgctctgttcccctaagggaatatcctagcagagttaatggcttcttttaaggctacagtctgctaaagtggaagcccctgctgaaatgtagtaatctcctctgtctctaatagttgttacttttctgctactgacttgcgtaaccccttaaggaatgtcacacagcaagtttcttttgttcttctcagcctcaagtctccttaagggcatgccctagcaagttcttctgttctgtgctggcaaatgaagatcttcaccccagactcttttgagaaagatttatttgggaaggaggagtctaggagagtggctgcctctgcaaagttgggaaaggacagccaacaactgagcaagcagacgggcttacatagggcttcttgggagcagagttttcccagggagaggtttctgctcagggattgtttagttttcctgctcagggactggttagtttagtgggtaagaggcagagatggttctaatttcagggaaaacttgtgttgttttcactggcctttttaaagccttttggctccaattttagggcgtggggggggatctttcactgtggcactggttttaaagtcagggtgtttttctttggttctgggctcagggataaagtgtttctttcactggctctgagttcagagtcaaggtactcagggattggttggtttcatgcttcagttggtctagggccagaggtggctgtagtgtcagttgctcaaagtgtgcttctttagctggccgttttaccctatacttgatacctgtggaagattgaaaagagtgatggatcccttgcaactggagttgtggatgttgtgaatcatcgtatgggttctgggaactggacttgggttctctccaagagcaacaagtgctatttatttatttatttatttatttatctcatttttcgatacagggttagggtaacagtcctggctgtcctggaatttgctctgtagaccaggctggcctcaaactcactgggatcctcttggctctgcctcctgagtactgggattaaaggtgtgtccacctggctgcaacaagtgttctttttttttcttccaattttttgtttgtcttttcctccatttctttctctgtcttgtgagacagggtttctctgtggctttggaggctgtcctggaactagctcttgtagaccaggatggtctcgaactcacagagatctgcctccctctgcctccagagtgctgggattaaagcacaacaagtgatcttaactgctgagccatctttctagcctcttctttcctcccccagaaacatttctagtgtgatttggagctctttttgagtttatcctcatcaggcctaaactgggtgcagtttctagtgaccactttgtgtgtatacatatacataaatgtatgtggaagtcagatgacatcattggtgttattcttcaagagatacacatgttcagctctttttcttacattggttctcgggcttgaattcaggtccccacaagtactttattaactgaactatctccctagcctattctcttttagtttttaaaatttattcttttaaatttccttttatattccaaccacagttcttcctcccaccccttctcctgccacccttccccttcccccaactcacccccaggccactcttcctcatgggtaagggccctcatgaggaatcaacatagtctgacataataggggcagggcctggactctctcccatgcattaagactgagcatggaatcccaccacagggagtgacctccaacaagctagctcatgcaccaggtgtgtatcatggtcctactgccagggatcccttagatagtccaagcttcacaactgtctcccacacatggaggacctagttcagttgcctggagtctctacaactgtcagtctagagttcgtgagtttccacgagtttggttcagctctctctgtagatttctccatcacgatcttgacctcctttgtgcatatattcttctttttctttgactgaattcctggagctctcggactggttcttggttgtggatctctgcatctagttccattaattactggatgaaggctctatgatgacagttggggtattcaccaatatgattactggggtaggcctgtttggtcatccactattactagaagtcttagctggggtcatccttgtggattcttggtaattatcctagcattagatttctccctaagcccatagtggttctctctattaagatatctttcattgctcttccactgcatctctctcccgctcaacgatcctgataggggatgtccttctgtatatatgtttctcttattggttgatgaataaaacactgattgaccagtagccaggtaggaagcataggcagtgctatcagaccaggagaaggctggggagaggaaggcagagaaggcatgtccttctttaggctgggaaagttttcttctatgtttttgttgaatatattttctatgcctttgagttgaacttctccttcttctattcctattatttttagattaggtcttttcatggtgtcccagattttctgcatgttttgtgttaaggatctgttggatttaaaattttctttgactgatgaatctatttcctctatcatatcttcaatgactgaaattctctcttccatctcttgcattctgttggttatgcatgcatgtgtggtttctgattatttacccagattttccatttccagaattccttctatttgtgttttctttattgcctgtatttcagatttcaagtctgaattgtttccttcatttgttacattgcttcttggttttctttaagggatttgtcgatttcttccaattttttgtttgtcttttcctccatttctctctctgtcttgtgagacagggtttccctgtggctttggaggctgtcctggaactaggtcttgtagaccaggctggtctcgaactcacagagatccacttgcctctgcctccctggcatagccagtactgttaaccagtgagcgatctctccagccccttcctccatttctttaaggtaatttttcacttcctctttaagcatctcaaccatcctcataaaattatattttaggttgttttcttctgcttcatctttgttggatgttcaggtcttgctcttgtaacagtactagtttctagtggtgcagtattaccctttatattgttgaatgtgttcttaccttgttgtctatgcatctcttcctccaattggtatagttagagcttgtgcttcagggggtctctctatctccaattggtgtacttgggggctgtggctccattgatcactccttcaggtgcaagcagagcagagcctatggtgatcactcctcctggtggaagtggacccaaggcttaggtggtcactcctttaggtgcaggtggggctatagctccgttggatgctcttcctgttggaggcagggccaaggctccagttattgctcctctaggtataggtggggttgagggttcagtggtcgatgtggtagctgagaaatggcagtggatgctggctgggacacaggtgctctttcccagaggaacttcttgtgatagcttctggaagccactgcagatctccgctgctttcgtctcatctggtggttgctccccactcctgggccagaggctcaggacttcctctgatgctgctcccaggcctgaggcttgggcttccctctgatgctgcttctaagcaagtggatcaggcctccctctgacgatgctctcaggcctgaggcttggacctggacctccctagattgtttaattttgtttttgtttttgttttgtttttgagacagggtttctctgtagctttggagcctatcctggaactcgttctgtagaccaggctggcttcaaagtcacatagagccgcgtgtgtctctgcctccagagtgctgggatttaaggcgtgcaccaacaatgtctggtgattgtttagtttttaaatgacagggtcttgtataatccaggctggccttgaacttttaaagaggcagagactggccttgaactcctgatcctcttgatgccgtcttccatgcgctgagataacaggtgtgtgctacgatgaccagcattctagtggtcacagttttttttcctataatgaagtttattagctcttctcttttttcataaatagaatgggtaatgttgataattctttataacctagtactcataagaaaattgaacaagattgtcaaaatcccacatattgatgcctttaacactagcatttgggaggcagaggcaggcagatttctgtgtgtttaagtttggcctggtctacatggtaaggtccagaacagccagggctatacaaagagaccctgtctcaaaacaaaacaaccccctcaaacagccccccccaattgaataaacaacttcagagagcagtgggaagccaaatgatattaacagagtagagaaactgatttctgaaggcatttctgatgtatactaaaatttcttaaaattgtttaccataaagatctttgcagttctagtacagtgcagctatgcaagatgaagtgtctgaagaggtatttacaaaaataggagtgtgtttgttttctattaataaaatgaggagaactagtaggaaaggcaattgagcaaaatcaaaccccatgatatgtgtgtgtatgtatgtacaactgtgtaaaaaagaattcttatagttgcagagtgtagttaaacaaaattttatatttttatgtattttattataacaaaataggcagttattgtgggtaaaatagtcattgaaatttgacccctccctaagcataaatttaaaattttaggctatgaactggatgtttccactgccttaatgattacgatagctccatgaaaacatttttcatctgcagttatgactatgaatttttatttaccttctgtgtaaaaggtgagctcctctaggccttaaatatggccttagttcagaacctgtatgaacaaattttgaaagacactatggtgttgcacaagtagattaaaaatatttgaacactattatttctagcaaatacattaagggagggttcaaacagtaaaaacataaagacctctgtgcatataaaattcctcatgaaatgagttaactcattaattttaaaataaaaacctttattttcttatttgtctaaaatttaatagtaatagtaatagaagtcaatggagaaaagaacttaaaagctaacacaaaatcattcatagtgactcagagttagtggtcacatttgaagaattataaaaatggctgcttaaggaattgggagatggttcaatggttaagagcacttgttttttcagaggacccaagttcagttcccagcacccacattaggtggctaacagctacctgcaactccagctttgggggatcnnnnnnnnnnnnntacacacacacacacacacacacacacacacacacacacacacacaatacacacatacataaattaagaaaatctttaattttttttatttttctattcttctatttattttacatcctagctgcagcctcccctcattctcccctcccagcccccccaactcccatccccgccaatcccctcctcttctatctctatctaggaaagggcaggtctcccaaggagtttcaacaaagaatggcatatcaagttgcagttagactaagcacttccccatgtattaaggctaggcaaagtgacccagtatgaggagtagggccccaaaagtcagtaaaagagtcagagacagcctttgttgccactgctaggagtcccacaaaaggaccaagctacacaactgtaacatatattcagagtgcctaagtcaggctccctggttgttggttcagtttctgtgagcccctatgagccaaggctagttgattctgtgagccttcccatagtgtccttgacctttctggctcatttctcctcttctgcaggagtcccatatactctgcctaatgtttggctgtgggtctctgcatttggccctatcacttggtggatggtgcctctatgatgacaattgagctaggcaccaatctggtcacaggagaggccatttcaggctacttattggctattgctaggagtctaaactggagtattccccatagactcctgggaaattaccctgtgccaggcttctgcccgaccctgaaatgcacccccagcactctctccttccatgtccccttcaacctgatcactcatattcccatccccacctgtcctcagtccactcacaaaatctcttctatttccccttaccagggacatctgggtgtccctctatgaaatcttgttacttagtctctctgtgtctgtagattgtagcatagctatcctatattttatagctaatgtccacttatgagtgagtacataacatattgtctttctctctctgggttattacacaaaatagaaacagaaggaacattgccaaattcttttttttccttttttttttttggtttttcgagatagggtttctctgtggctttggaggctgtcctggaactagctcttgtagaccaggctggtctcgaactcacagagatccgcctgcctctgcctcctgactgctgggattaaaggcatgcgccactactgcacagtgccaaattctttctatgaggtcatagtcaccctgatactcaaaccacacaaagacccaacaacaaaagagaattacagaccaatctccctcatgaacattgttgcaaaaatactcaataaaatactgccaaactgaatccaaaaacgcatcaaaaaatcatccaccatgatcaagaaaatcttttaaaatggctgcttaatctctggaatgaattctgtgttgagaacatgggtgcatgtgtatagtgtgtgtgtgtgtgatacgcagacctttgaccaagtggcagagttgaaggactcatgggttgcagccttgtctgatgtgtggtgggctttcagtctgtggagggttagtgcatagtacttactgtggagtgggaagcctcaaagagagggtggctcctgtccttgaggagttagagtaagactccctagctgggaattctctgaaggagatgatgcaaaataagaggcagtgccttttatatcctcagagttcctatcagtcctaagatctttgtgcatcctaagaaagacctcaacatttatgtactgtggggccatagcaggatgaagccttctccctgcacacattgagattttgtcatttgacctgaatttcagacaggatttgctctagatttttttgctctagattttccttctcagaatagtggccagccagggaggtagtttggccccactgtgggccaagagactctgtgagcaccctttatctttctctagggaatgcagctggaagatttgaggcaacagctccagcaagctgaggaggccctggttgccaaacaggaattgattgataaactgaaagaagaagctgagcaacacaagattgtgatggagactgtgccagtcctaaaggcccaggtgagagctctgctccaacctgcctgccacatgagtgacccaccctcccaggcagtggggtctggtgcacctctttggcatcattctttggtggcctcttttagtcttcttgagtcctttgcattggtccttgacctcttggtgcccttgggatcacaggctttcatatctgttcctagtgtactatcatgtggctctgggggacatgacaagattctgttcctgtggggcatggcatagaatgcctgatgggcagctgatggatagttggcatacctttgttctatttgccaggcggatatctacaaggctgacttccaagctgagaggcatgcccgggaaaagctggtggagaagaaggagcttttgcaggaacagctggagcagctgcagcgcgagtacagcaagctgaaggttggctgccatgagtcagccaggtgggcctctaagagtgtagccaagaacacagccacacacagagcagtcatatactagcaacaaccagtagtaactgcaggagattgatgactcttggtgtttgcattaagttccctttacctcctgctgctctccccatgttctgtccttccaacagtgacctttaccactggtccaactagaaacttcacagaaatgcatgtattgataggtatctaaggctggagtttttgaggggatgttaggtttcctagtgtcttagtttggtttccattactgtaataaacatgatgactaaaataactaagggaggaaaggtcagattatagtttataatctgtcatggaaagaagtcagggctggaatctggaggcagaaactgaagcagcagccagaggggaatgatgcttactgccttgctcagcttgctttcttacacaacctagcccaccagtccaggggttgcaccacccactgtagctgggtatctcacatcaattattaatcaaaaaaagccccacaaacttacctacaagccaattgagattctttccagtttgtgttgataaaagccaaccagcacagttaaccccttgtcaacttgacatacaaatacaccaaaacctttcctttcttatttgttctccaattcatgttaagatgacaatataaaacataaatttaggctgggcagtggtgacacattcctttaatcccagtacttgggaggcagatggatttctgagtttcaggccattctggtctacagagtgagttccaggacagtcaaggatgttacacagagaaaccctgtctcaaaaaacaaaaaacaaacaaaccctcctcccataatattgaaagtcccacagtctttaaaacattccatcactcttaaaaaaatgtctctttaaatgtctaaagtccatcaatgggctcctataaaataataaggtacatatttttttactctaagagcgaagaaccatggcacagtcacaatcaaatcaaagcaaaaccaaaatccaacagtgtaaaaaaatgcagtgcttgatgtcgggtatccactaataatcctctgggctccaaagggcttaggcagctatacttctctggctttgccattcatagcacacatacatactttgtctcataagctcaggctggcttctctccacagctactgttattcttggtggttgtcccatggtactggcatctccactgcactgagggtgcaccttcacaaataacttctcctgacctctcaaatagtaccaaacctcagctgctttccataaccccttcatatagcccaatttgactgctagcatgagatgcaacattgacccactctgaaccagagcttctgtgtactgaccctgaggatatactcactggattctagagtctagaagatttcacctcagtgatgctggtctcttaatcactttcttggcttcaggtaaccagcatcaattgtgccagtaaagcaaaggttttacttcaatgctgctggtctcttgttcatcatacctgattcttcagctccagctgaccagaactacagattcttatttcaaaataccacatgaatgactgtgatagaatctttgctttgcttccctctgaaactttacaagccaggccttcatcattttcattgctgtcagcattcttatcttccttggctcccacagaacagcccattaagctctaactacttgatgatggcatttccagtccaaaattccaaagtccttccacagtctttcacaaaacaatatggccaggtctgtcttagcaaatccccaagagcctggtactaatgtctgtcttagttttgttactgttgtgataaacaccatgaccaaaaacaacttggggaggaaagggtttattcatcctacagttttactatgattagggaagtcagggcaggaactagagatgggaactaaagcagaaatcatggaggaactgctttttggcttgttctccatggcttgctcagcttgttttcttatatagcccaggtggttacctaagggatggcaccatccctagtgaactaggcactctcacatcaatgatcaatgaagaaaatgccccacaggcttgcctccaggtcaatctaatagggacgtttactcaattgaggttcccttttatcagatgactccagcttgtgtcaaactgacaaaaaaaaacccacaaacaaaaaaaactaaccagtacaaatagagttctcccaaattcatgtctacctaaaacctcataatctgacctcatttggaaatagtatctttgtatatatagctagttaacataaggtcctatcaggttaataaattgactgtggtctttatagaagcaccacattaagatacataaggcagacacaagaaggccaagacaaagagtctgggattcagctataagccaagaaattccaacgaatctgttaactattatcatctaggggagagtatggtacttctgcccagtcctctgatacgttgatttagggcacctggcctcctacatcgtgcacatttttgttatttttaagctaccaggtatgtggtagtttgtagtaaggttctgagaaaactgatgtagggggaacccaggagtaattgctagtaagtacaaagtttcctttggaagatgatgaaatattctaaaattatacaaatgattggatatgctgaatatagtaaaaaaacactgaatgatacaatttaaattggtgaattgtatggtacatgaattatatctcaatgaagatgtttattcataaaaattcctgcaggcattgattgaatggtttttgttttcaaaggattgaggatatgaggaagcgacatgtagagacttcccagccccctttactccctgctccaggtgagtgaacaggtggtagatgatgggtggagatggatagggagggcagaatattgtgctgagggaaagcatgcattagcctccctgctgctctgatttggggagctcttgttggccatccccagcagtagcctacagcaccctgaggcaaaaggaggaatgtgctggtagaggtggctcccagccacacatagtcaaatatggtggtatctgtaggtcttagtaccttgttagcctctccttcccttttgaggtctacccagtctgttcatgaagcctatccagctggcctctgttttttttttttctcagctcaccactcctttcatctggctttgcccaaccagcggagaagtcctcctgaggaaccacctgacttctgttgtcccaagtgccagtatcaggcacctgatatggacactctacagatacatgtcatggagtgcatagagtaggaacagcagatgtaaggccacttgtaataccatgtcctgaactatgcaacctgtgctttcctgtttcacctgcatagtccacaattaagggcttgttgtcaaagagctggccccaggacctagttggatccttgctttagcccttaggcctgctagttctgcactgggatagacagccccagtcagggctgtgttttccccttttcttctgtgtgcctgagtcagttgcctctgtagcttcttcctccctcctgtattctcctaggaagtctagaatggaggtcaggggctctcagggagcatcccttctccaagcagggctgggtgcagctcttcctccagctggtgccttattgccctgagctgcagcctgccctcccagggtatgtgccacttagggccataacatgtgttgcctctgatggacatttgggaagtattccatctttttgctaccgtaactaatggtgtagtgaaagtacttgtacactgatctatgtgtaccattaagacatatgcttagacataacattggagccttgccgtggaggaggttggtccacctttgtgtttctgccatctgctagacatgttgttctttactaaagagtgtgcttaagtgtctttttctggtgtatgtgggccctttttaattctgctgatgtaacttggatttgcatattttctacccacttttctgtctcatcattgccatttgttcctggggtgctctttgatcatgagtcagattagctcttgtctatcacagaaagtgcacaacttgttccactttgattgtgttaccgttttgggtcctggaagctgtttatgtactcatgtccattctttactcccatattttggctttggagttatgactgctttgtgatctgacataagggtatttcacatacatgcttttcttgttctagccccagtgtgctcttctctttggaaagcacattgttgtcttgtgtgaatgttggtttccatagttcatcacactcgagaagtttgtgatggcatgttctccactagcccagataattctgtcttgggaaccatttagtagtgactggcagattgtgaacaaggttctagccattttctgggaccttacagtcattggtattagccttgctattctagtaaagtaaaggaagttggagttgagaaagcaatagatgtgccttgctgactcctcaggcctgaaaccctttctgccctcctgcaagctttcatgtttctgagtgggatctgtaaatcaatccctgcctgggctttattcacagggcttcttgccgattaagagagagaaggttgagtagaattaggatttaaaaagtaagcctgagctgggggcttcctcagaatttcctgtttcctaattcccaggtatctatcagacagatctttggggaaatgttaaaggaatagacatgttctttgctcatgaacccttcatttaaatacctaatttaattttccttcaggactgctattgatttggtttgatttagttcagttttgtggtggccaatgactttcctatagctgtcctaaaaattcccagaggcttgaagcagcaaaagaatcactcttttatgtctggaagtcagatattaaatttcttctgagaatcaattccaggctttctctcagctcttggtagtttttggcagtccttggtgttgcttggcttatagacccatcactccaatctctggttctagggcctaatggtctcttcctctacaccaaattgtagatgtggggtctatctggtaattaagaagctcaagactcttgcctcactacaccttccatgacccttttcccaaataaagtcatgttctcaagttctgagggtttgggcttacacaacccagagtagggatatcatcagaacctgagtgcagcccaaaggcaggactctagggtgatggtgactgctaggcttcagaatttggaggaggtcccttccttctaggtgctatgctcctagcagggccagtgggtgtgactgagaaaggcaggttggctgtagcaggaaagagctgtttacttcttgaagtagctgtatgggcttcatgcttcttggataaatagagatacataggtacatttctgaccagtactttatcctgaaagtggtgcagaaagctggtgttgacccaggttgcacagcaggatcacctagaagccttgaaagcttgaaaacattctggcttgggctccatagactggtcaagccaaaatctgagggtggccccaggcagtggctgggatctagtacctttctcagaaggtgggagctcttgacacctccttaccctgaagtataatgggcaattaaccacacattaaataccaaggatctgggatcctaccatcttccctgacgtgggacatgcttctttcttttctggaattatttaattagacctggaaaaactagttgttggtccttaacccctcacacaagggaattagcctatttgcttttatgagctatggcccctagcagacagcttctggatccagacatccagaagcatattcttccccagaagtcctattactgttacttatgctctcttcctgttgacccatgaccaagagaaatccagagaaacagcaagacagtgcagagtacttcacccactgcagtaacaaaggataaggtgtagattgtaggtagagatgatgtcaaaataggaacagttgcagcactgtgtgtgataccctcaggcatggtgaggccttgaagtgtttcccttttcaagggaggctgtttggtgagatggaacaagcactttggaaacattctcagccctctttatatgacaacttcgtcctcacagtgactatttcattggagtggctctcatggccaccatcatttgtcactaccaaaggctgtgatgaaataggccatatatctgatgacataggcctgcatagccagcattttgaacattttgttgcatggaacattttctgtagtatggtataaaaaggccagaggattaaattatgcacaaaatatgaaataaagaagacctgtaagcatgcaccctgtcctcacttagtggatgtatgggcagaattgccagtaacagagtttttttggtgctatttctatgtctttaattctgatgcattatataggaagtagctgttgcatacaactttgaggtttcctctgtctatgactgatacaacagagtggtgcaaggggccaagtcaactaacatggggcctggatttcctgtgactgcagcaacaaagtaccactcgttgggggcttaggcaacagagatttcctgtccccctgttttggagggcagagatctgagataagtatgggcagagtgggttcctcataagagataacccattccagacccctttcccattgtgtagtaggtcccagcaattcttagtgctctctggttggacctgcatctcagattctgctacttttgtcacatggtcaccttgtgtttcctttttataagcacaccagtgtcaaacaaaggtggctatttggtaatacaaaaaacattttgttcagtatttagtgatggaaagagccaatctgcagagatagtcatagaacagcatgaggattttaggtatggagctgtggccaacatcatggagagaggaagaggcatctatctagtcactgctggggttttggcttcacaccctggtacctgggccatgtatctactactgggagaacaagggaaaaggacatcagagttgtgagagaagcagttcagcgttcaattctgatctagccaggttcagtgcaagatgtcttgggtaccttcatcttgccttgactgttaggggtggattcacattgagactgcaggcttttagttatccattgtttactgtcaaccagtgtgatcaggtaaatctgtttccactttgcttaatgtactccactgattttctgttgcttcaggtataaactctatcctcagccttatgttgctctaatttcatgtcatcttccctaaaagcccagccattctacactgaaccttttttcccctcaaacccattagcacttctgtgccttaaggcctttgcctctgttggttgtctcctttgctgagaaggctgtctcctaatcttcacagctgatttctttttgtcattcagatctaagtataaacaaaagttctttaattcgaagtctttatcctaaatcacattgccttgttttaatcacatcaaaaccttctctattctgctgtttctttcctcccactagagggagacagaagccttgtcaatccaatttagtaacttatacaggaagacctcagcacagggatactgtgtttactgatggctgagcttgtctgacatgacatcaggattcctctgccaatattttcacagacatcatctgtcaccataattggtgacttatagaagttattatattaatgtactaggaataatagtacaaaaatcttattttagaactatacatttttttggtgctgaggatggaacccagggtcttgcacatgctaagcatgcataccaccactgagctacaatcccactttatcagcttttctctgtatccccctacccctctctctgtagtcccattctgtagccctgcctagcttggaacttactatgtaatccaggatgcccttgaacttgcagccatcctattgcctcagtgtctctcttcagttctaggattaaaaatatgtttcacttgtgctcgcttcagctgcacatatacaaatatgttccactatgtctgacctttttcattttgttcagaatttgaatgggtatctgggcacaatgatacacacaattctgacccttgagaggaagaggtagggagagtaccatgaatttgagaccagcatggacacaaagcaagacttggtttcagatagggaaaaacatgatatgaaaggatggatcatgtgatcttcataatatatacttaaggaaacagattctgaagtcatagggacaagtttcagtctgaacattaatgaaatccctgagccttggcttcctcatctgtgaaactgtagattaattttagtttagacccaagtctagattttacattaggttttgagctggaatgaaagtcagttggacctgtctatgatagagcatgaacttgaagttgaagcaggatgctaatgagttccaggatatcttaggctacataataaggctctctctcatatcacaaacaaaaagtcaactggtgaatccctggggatgggtgggatgaggagagagtgatagcggacacaaggttctttggggggaatgggaatgttctgaaattggtcacagtgatgatcatacatctgtgaatatgttacagaccattaaattgtatactgcagatgagtgaaatgttgtatgtggattagaccacaataaaactggcatttaaaatgttatctaagctctgtacagtttcccagaaccttttgtgataatacggatgaagatacagaaagagttgaatatttgcatttgaagttgcttgacaagtgacctattgatgggctcttggtattgttccattaactagaaagacagagctggaggtaggacatatgtggttggctttgtctcatgaaatagactgatcacatcatgtcctttcttcagagtcccagggttggaactaactgaagattagcagctccttctcaaccagcttggcctggagggctgagcaacaggtgaacattaccgcatcatcagaggaacagaattaggtgggcaaatatggtagatactggccagtggggaagtggggaacactagggatagcagcttttaaaaaattccacttgtcccagttgttccaggatcagggctggggatggaatttgatttgtcagtatggcagagccatggtagacacatgtctatcagacctaaagataaggtcttatgccatattcaggggttgctggcagctggagtgaagggctttgtgtcaaccctagaaagcactgcaaaatagtcagtgcacagagaaagcctaaaattaaacaacaccagcaccagcaaatcccacaaaactaagctcacaatgaggtgagatgctcatgaactgaagtttctacaatgcagagttatgtctaaagaaaagatgcccagtcagatggttcagtgagtaaaggtgcttgctgccaagcctgacaacctgagtttaatcctcaggacacatggtgaaaggaggactatgatttccacatatgctgtcttaccccccattaataaatgtaacataaatctttttaaaaagttaaaagagaggctggagagatagctcagcagttaaaagcactgactgctctttcagaggacaaaggttcaattcccagcgcccacatggcagctaggctgtctgtaactccagctccagggatccgacaccctcacacaggcatacatgcaggcaaaacaccaatgcacataaaaataaaaaaagttgaaggagtgtgaggatgaggcttagtggtagggcacttgcctacacttggtttctgtcttgagtactgcaaaaaatgaagaaaaaattggaaatatttaaggaataactaaagaaagcgactataaacataaaataaaaaacttttgagtttgaaatattagcacaaacctgatttatttttatttttatttttgaaaaatagatatttttcctcatcttgaaatgtcctcaaagcaacaataacacaatagcagnnnnnnnnnnnnnnnnnnnnnnnnnnnnnnnnnntatatatatatatatatatatatatatatatatatatatatatatattcatatattcaaatatttatgatttattgtggcatcattaaaaattaaaataaaaacaaaacaaaaacaaagatacaaagattcccttgtaaatgttcttactgaaggaaatcagggcctcttggagaaatgacttatttcaggcatgatatgggaatctactcaaggtaaacttgagccatttttaaaaaatgacattatgtgtgcacatagacacaccatggcatgtgtgtggaggtcataagacaacttgtggagttggttctctcccatcatgtacatcctggggattgatctcaggtcattggggttggagacaaagtgcctttacccattgagctgtcttgtcagtccaaaccaaagacatttaaaaattattttgtgtgtgtatgtgtgtgtgtatatgttaggcttgcatggcaagcacctttacctgccatgtcatctcactggatgcaatctgagacaccttataaaagaaaacaagagaggctggacagattgctcagtgggtaagaacacttgctacataagcatgtaggcctgagtttgaatcctcatcacacatgggaaaatctctcagtatggcttgaactgaagcattgtcgggggctgagatgaagttggttggggcttgctgattgccaggctagctccaggtttagtaagaaacctgtctcaagggaataaggcagagatgatagcgcaggatacctggcgtctttctctgatccctgcttatgtgcagaacctccacacatgtgaaatacactaacagaacataaaacacacagaaaactatcaaagatcttggacatttgcaaggaagacagctgtcaccattggatatgaatatgggatcattaggaaaaataacaactctgtagacttttcctgccagtctctcctctacctctatcccttgtgcctgtgcttcccaaagcccttacatctgtgaacctcagggcagagaagggacattgagaaaagggttggactgatatgaagaatggttccttacagagtacaacagtgtcctgcctgagaaagattttaaggattggcagatctgtaagagaaaggcatactcaatgagtatgacagtgtcttaatggcctgatggaatctgaagattggctccacagtaaatgtattgtgggaaagggggctcaagtgtgggaaaggtaagaagacttgctctaaatatttatttgactgaaataagagttcaggatgggttacagtgtcacaatgggctgagttccatcaccactgactgtctagagcagtggttcacaggttgtgggttgagtcacctttgtgggggtgttgaatgaccctttcacaggggtcaaatatcagatattgtgcatatcaggtatctcactataattcatgactagcaaaattacagttaagtagcaacaaaaataattttatgcttgggggtcaccataatatgaggaactgtattaaggtgtcacagcattaggaaatttgagaaccactgctctagaggattgccactgtggtggccattgtagctgtaacataggcagagtcatagagattgtatcacaattgaagatacaaatgaggggctctgagctgtggaagatcaggttttgtaacattctaagagaatggttttactagagaattgacatgttccagggttaggacagagaaagcacaagatgagccaaaccatcttgactcagaaatatgcagatgctctcaaagaataactgagacacatttagcaacactagggaaaaaactcaaaatgactgccagcagaaaccaaagtaggcacataattgctaatattgttattgagccaaaatttccctcagtgttatcttgcagggaagaattcagctcagaaacagcttaagcaagaatttagtatgtttagtatgtttagaaaatgatagagcactactgagggtttagcagggtgagatcttggatttgtcattaaaatgcttgtgaattattttgaattatgtgtatgtgtgtgtgtcttgtatggggtatgcaaagggccatgggactgtacagcagtgacaactagtgtttaacaagttgacccacttggggagtcccacttgtcaaagccatggggctattgactggacgactggctgtttctgtgtgtagctttctcaggcaacactcctatacctccctaataagaacagctgtggagttctttccatagccccttgatggtgtactttatacttgttgggcacacatatagctgtggaaggtcaggaagatgatttctgcctatatttattacattactcagaatgacataggattctgtcacaaagacagcctttcacacagacagctaactttagacttcacagaagattcaaaggaggctggttgcccctgaagacaaatatcgggttgcccctagagtcaaaacacatgtgttttactgattcaaggccagaacttgaagcaactttagtctacatgtacaccctaccactcaaggtccagctaattaattgttaagttttgatttccaatgttgctttgtgtctgggaaccctcaccaacttagagctacaatgtgacattactaacctaagagaaactgcatgacttatattggtttttgagaatgggttgggccctgaaaatgtaacttatacttgtccagagtttggctgtgtgagaggcagagaacagaggcagcagacagcagcagtgatgcagagagagaaagatagcagcagcagcacggaagacagtgaggagagaacaagagaaatagagcattggaaggagatatagagctaagtacgaagctgtatagagaagcaagagagattcttttcagagacgatttttttcaagatgaagagattgttaccatcagaaggcatgtttccttatttttccccctttaaataggaaagtctagcccccactgcctatatggattttcttatttactctggtgccaccaaataagtaagcttcaggggtatgtgcacatgagtacaggttcctgcaactctagaggatcagattccttgggcccagagttctagagaattgtgtgcttgcctggaatgaatgctggaaaacaaactcgggttctctgaaagatcaaatgcacttaaccattgaaccatctctctagccccataggatttgttatttttgtttttattatttctaaatttctttgtttttttgagacagtgtttctctgtgtagccttggctgtactggaactcactctgtagaccaggctggcttgaactcagagagatccacctgcctctgcctcccaagtgctgggattgaaggcatgcaccaccaatgcttggcaattatttctttttaattaattatttaaattaaaaacttattttgcaaagcaatcccagttccatctcccccctacctcccattccccacaccaacgccctcatcccacccccatgcattcctcagggagggtgagacctcccatgagggatcatcaaagtctcacatcatttggggcaggacctagaccatcctccgtgtgtctaggctgagagagtatctctccatagggaatgggctcccaaagtccatttgcgcactagggataaatactggtttcactgccagaagccccatagagtgcccaggcctcctaaatgacacccacgttcaggggggcctgtttcagtcctatgctggtgccccagctgtcagactggagtctttgagctctaaaactggatttaaacaacagaaataacagaaagcctacaaactcatggaaacagaacaattctctactaaatgaccactgggtcaagcagaaataaagaaattaaagacttcctagaattcaatgaaaatgaatgcacaacatacccaaacttatgggacacaatgaaagcagtgctaataggaaagttcatagcactaagtgctttcattaaaaatggagatatttcatactagcaccttaacagtgttcctgaaagctcaaggacaaaaacacactaaagtggagcagatggaaggaaataatcaaactgaggtctgaaagcaacaaaataacaatacaaagaattaaagaatcaaagagttggttgtttgagaaaacaaacaagatagacagaccttactcaaatgaactaaaacacagggagagaatacctaaatttacaaaaccagaaacaaaagggggacataacaatgagaaaatccaataatcattaggccatactttaaaagactatactccagaagattaggaaatctaaaatggataatttcctcaatagataaccacttaccaaagttaaatcatgatcatataaacaacttaaatagatctaacctatttaaggaaatagaagtagtccttaaaagtcttctaacaacaacaaaaatcccagggccagatggttttagtgtgtaattctaccagattttcaaagaagagttaacaccaatactccccaaattaattatttccacaaaatataaacagaaggaacattgtcaaactcattttatgaggccacagtcaccctgatgcccaaaccacacaaagatacaacaaagaaagagaattaaaaaccaatttctcctgtgaaaatagatgcaaaaacactgaacaaaatactcttaaatcaatagtggaaagagtgcctgaactggaattcccctgtaaacagattgaggactacagtaattgttatcatagaaccttcatccagtagctgatggaagcagatgcagagatcaacaacttaccattggtccaagttcctggagttcagtcaaagagagggaagagcagtaatatgactaaaggggtcaagaccatgatggggaaacccacggaaatagctgacccgagctagtaggagctcactgactccagactgacagctggggaacctgcataggacctaactaggccctctgtatgaaggtgacagcagatggcttgagaagttgtggggccactggcacagaaccagaatctaaccctagtacatgaagtggctttttggattttaattaccttgctcagcttagacacaggggaggtcctcggtcctgtctcaacatggtgattggatagactttgttgactctccatgggatgccttactctctctgaggagtagatggggggataaggtggggggaatgtgggaggagtgtgagaagagaaggggggaactggtattggtatgtaataaaaataaaataataaaataaaaaatgtgtgcaaaaccaaaacgaagaacacatcaatgagctcttgaaccacgatcaagtaggcttcaatccagagatttagagttggtttcaacatatgaaaatcagccaatgtaatccaccatataaacaaactgaaagaaaaaaaggacacattatcttttcatttgatggtgaaaaaacctttgacaaggtccaacacccctttatgataaaagtattggtgggatcagggataaaaggatcatacctacgcataataaaggcaatatacagcaaacctatagccaacatcaacttaatatctcttcaatattgtacttactagagcaataagacaacaaaaggagatcaaggggatacaaattggaaaggaagaagtcaaattttcactatttgcagatgatatgatagtttacataagtgacccgaaaaactctatcagggaactcctacatctgataaacaccttcagcaaagtggcaggattcaagattaagtaaaaaacaaaaaaaaaacaaaaacaaatgacagactgaaaaagaaatcagggaaccatcttaaatgtcatatttatgtagatctctgaagtgtttgaaaatgacctgtctaatatatctgtttgaccttgaaaatatacctaacaggacaagtttgattataataggtgactaactattagcctgcatttctttattatcctaaatagtttttaataataactttcaaggaccaaaaatgtacattacattgttgaatgagctatataggtatgataccttgaacaagagtagaaatgtatattcagtatgttctaacaaaaataaactcaaatttggccgggcgttggtggtgcacgcctttaatcccagcactcgggaggcagaggcaggtggatctctgtgagttcgaggccagccgggtctataagagctagttccatgacagcctccaaagccacagagaaaccctgtctcgaaaaaccaaaaaaaaaaaaaaccctcaaatttgtaccaatattcaaaaactatctcaaacaagagtagaaacatatatccagtataacaaagataacctcaattttgtatcagtatacaaaaaccaatactaatgaaaaatatttaagactagtagttgcttttttggtttaaaagtagattaaagaaatctattcttttaacctatcatatctatatctccccctttccttttcagaacaagaaccctgaatctaatttcatttgttcagcttttttttcctgatcactgctataacagcttgtaactaaccaccccaaacaataacaatatccataacccattgaatgaccaaaaacacccatcctacctcttggaaatgtgggcttcatattcttaacattacttcttgtggtaagtaattttatgatggcatctttagggaaccctgaaaaaaattgggataattgtcaagtcctgggctagctatctgtatcatttgttgttcagtctctgtataatggaaaagtacagggcttatctcaaggtctggctagagtagtctgtgaggctggaccatctcagctacccaccttgaaattgtcctgagcaatttgacatccaaaaccaatctttgggtgatgtttgttggcttagtgaccttaccacaatctaggtggaatctttgttgtggggccccatcctccttttggagacttcaaaggttgctgtaggcatggtaatattttactgcagcaaacttaagcttaagttttaaatgtcatatgcagcagatcttgaagaggttaaaggaccataatttgctatgtacatctagagtacaaaaacttaattcctagttagctgatagagactcaaacccgaaatcatatacaggaaagtagatgaagcctttttctagaattagttctctatataatcatttatatcatgacaaaagttgaatatatgtaaatattataaattttgatataatactcatacattaaatgttttaaagaatcaaaaccaaagaattatgagtttagtggcaatagaatagtcctttaaattttgtttttcttttatcacatatcaggtggatcttctgacatgatacagagattttggattttcttttggcaagcatgcttgagggaccaactagggaccagaaggaggtatgtgagctgggcaggcatgccccaacctactgacctgggactgaaaggaggtgtgtgagctgggcagcccagaatcatcgaaatcatctgctgcctgaaattatagtaagaagctccttttggaaagagcacctgtgtcccagcaagcctccagtgccattctctgtatatgatacccagcagtatcagtgaccttcagagcatcagaaccgcctacacctagaggagtgatcgctagagatgtggccttgcttacacctggaggactgatcaatgaagctgagcccctaactacaccaattggagagagagggaccccctgaaacacaggttccacatataccaattggtggaagagattggtaaacaacaaggtaagaatacactcaaagagcaataaagcaccgccagaaactagtggttctacaggaacacaacctggacatcccaacacagatgaagcagaagaaaatgacctcaaaaataattttgggaagatgatagaggctcttaaagaggaaatgaaaaactcccttgaagaaatggagggaaagacaaacagttggaagaaatcaacaaatctctaaaagaaaatgaagtcaaaacagtcaaacaggtgaaggcaatggttcaagacttaaaaaatgaaataagcacaataatgagaacagcgaccaaggaaattctggaaagggaaaatatgggtaaacaatcaggatctattgatgcaagcataaacaacaggatataagagatagaagagagaatctcaggcattgaagacatgatagagataataagagtcatcagtcaaagaaaaatgttatcaaacaaatttttaacaaaaaatatccaggaaatctggaacaccatgaaaaggaggaaccttagaataaaaacaggaatagaagaaggagaagaaatacagctcaaaatcacagaaaatatattcaacaaaatcatagaagaaaacttttccaacttaaaataggacatacttatgaaagtacaagaagcttacaggacaccaaatagactggacaaaaaaatccccttcccacataataatcagaacaacaaacctacagaataaagagaatattaagagctgcaaaggaaaaaaggccatgaaacatataaaggcagacctatcataattacacctgacttctcactggaaaaaatgaaagccagaaggtcctagacaggtattatgcagacactaagagaccatggatgccagcccagattactttacccagcaaagctttcaataattatagatggagaaatcaagatattccatgataaaaccagttttaaacaatacctatacacaaatccagccctacagaaagtactagaaggaaaactctaacacaagaagttagctacatccataaaaaacaggcaatagataatctccaaacagcaaatcccaaagaatggaaaagtacacactaccaccaccaaaacaaaaacaaaaaacccaggaactagcagtcactggtcattaatatccattaatattaacggattcaattctcctatacaaagacacaggctaacagaatagatatgaagacagaatccatccttctgctgcatacaagaaacacacctcaacttccaagacagacattaccttaaagtaaagggttgggaaaagattttccaatcaaatggacctaagaaacaagctagtgtagctatcctgatatctaacaaaatagatgtcaaactaaaagtaatcaaaaggatggagaaggacattttatatttgtcaaaggaaaaatccatcaagaggaagtctcaattctgaacatacattccccaaatacaagggtactcacatttgtaaaagaaatattactaaagcttaaatcacacatcaaggctcacacactaagagtgggagaccccactttcaccacttaccccactttcaccactggacatgtctgccagacagaaacttagcagagatataaaggaactaactgatgttatgactcaaatgtgcttaacagacatctatagcacattccatcccaaacacaaagaaatacaccttctcagcacctcatggaaccttctctaaaattgactatatactcagtaacaaaacaaatctcaacagatataaaaaaattggaataaccccctgtatcttatctgatcaccatggcttaagttagaattcaacagcaacatcaatttcagaaagcccacaaacacatggaaattgaacaatgatcaactgaatcaccactgggtcaaggaagacattaaaaaaaagaaattaaagacttcctaaaattcaatgaaaatgactgtacaacatacccaaactaatggaacactttgaaagcagtgctaagtggaaagttcatagcactaaatgcctccataaagaaactggagaaatcccacactagcgaactaacagaacaactgaaagctctagaacaaaaagaagcaaactcacccaggaggaatagatgttgggaaataaattgagggctgaaatcgatgaaacagaagcaaagaaaacaatacaaagaatcaatgaaacaaatagttggttctttgagaaaatcagcaatgtagacaaacccttatccaaactaatcaaaaggcagagagagaatatccaaattaacaaaatcagaaatgaaagggggccataacaacagacactgaggaaactcagttcaaaaacctacactccactaaattggaaaatttaaaggaaatggataatttcctggataagtaccacatacccaagttaaatcaagaccagataaacaaattaaatagacctataacccctaaggaaatagacagttatagtgggaaattaccaatacggagtcaggtagaaatataagggtatttaatagggaaaagccttacttacagagcgacctagccagccagcgtggcagcagtctgtacacaagcccaaaagagaaaccgaaagcgaaaacgcagtcaccctatgtcccctgaccacgccctcacaagcgtggtcaggcacacctgtagctagcccctaagaaggcgtggctacagcttcccctacaattccccttttagtctaaaagaggaataaaacttaacagtgtaaattatccaaaattaacaatcataaaggtaaaatataagaagatacaataatctgcttatgtcacatcctaactgtctattttaactaaaccctaaagtcatctaaaaggggtgtccaagcctgaacacctccttcaaatcccaaccataaacaataggaagctattgctaactaggtatatacactatcctaagtgacaacaatggggaaagggggcgtagcattctccaagttacttcctgctgcaatggnnnnnnnnnnnnnnnnnnnnnnnnnnnnnnnnnnnnnnnnnnnnnnnnnnnnnnnnnnnnnnnnnnnnnnnnnnnnnnnnnnnnnnnnnnnnnnnnnnnnnnnnnnnnnnnnnnnnnnnnnnnnnnnnnnnnnnnnnnnnnnnnnnnnnnnnnnnnnnnnnnnnnnnnnnnnnnnnnnnnnnnnnnnnnnnnnnnnnnnnnnnnnnnnnnnnnnnnnnnnnnnnnnnnnnnnnnnnnnnnnnnnnnnnnnnnnnnnnnnnnnnnnnnnnnnnnnnnnnnnnnnnnnnnnnnnnnnnnnnnnnnnnnnnnnnnnnnnnnnnnnnnnnnnnnnnnnnnnnnnnnnnnnnnnnnnnnnnnnnnnnnnnnnnnnnnnnnnnnnnnnnnnnnnnnnnnnnnnnnnnnnnnnnnnnnnnnnnnnnnnnnnnnnnnnnnnnnnnnnnnnnnnnnnnnnnnnnnnnnnnnnnnnnnnnnnnnnnnnnnnnnnnnnnnnnnnnnnnnnnnnnnnnnnnnnnnnnnnnnnnnnnnnnnnnnnnnnnnnnnnnnnnnnnnnnnnnnnnnnnnnnnnnnnnnnnnnnnnnnnnnnnnnnnnnnnnnnnnnnagtgtcctttgacttctggagatgagttttcctgtgaagataaaaacaaaacacttccctttcctttgtgagatttctatccagtttatgagatataccttggtagagtacctgtcatttctcctcgtcgaggtttttcctttgcaactcgaatcttgaacaactttgatggtatccaaagttttcttctcctgtggaaacaaatgcaaaaccccaactccagcgtaacacatgtcctggtttccattcagaagttagtacatctttgaagtnnnnnnnnnnnnnnnnnnnnnnnnnnnnnnnnnnnnnnnnnnnnnnnnnnnnnnnnnnnnnnnnnnnnnnnnnnnnnnnnnnnnnnnnnnnnnnnnnnnnnnnnnnnnnnnnnnnnnnnnnnnnnnnnnnnnnnnnnnnnnnnnnnnnnnnnnnnnnnnnnnnnnnnnnnnnnnnnnnnnnnnnnnnnnnnnnnnnnnnnnnnnnnnnnnnnnnnnnnnnnnnnnnnnnnnnnnnnnnnnnnnnnnnnnnnnnnnnnnnnnnnnnnnnnnnnnnnnnnnnnnnnnnnnnnnnnnnnnnnnnnnnnnnnnnnnnnnnnnnnnnnnnnnnnnnnnnnnnnnnnnnnnnnnnnnnnnnnnnnnnnnnnnnnnnnnnnnnnnnnnnnnnnnnnnnnnnnnnnnnnnnnnnnnnnnnnnnnnnnnnnnnnnnnnnnnnnnnnnnnnnnnnnnnnnnnnnnnnnnnnnnnnnnnnnnnnnnnnnnnnnnnnnnnnnnnnnnnnnnnnnnnnnnnnnnnnnnnnnnnnnaattaataaatgatcaatctcgtcattgccttgtgctagtgggcctggcaaactcgtatgggatctgatatgtgtaatatatataggattgcttctgtttctgatagtctcctgtaattgtaaaaacagagaagttaattctgtattatcaggaacaaattctacagtctcaatatgtaacatgactctctctgcatattgagaatcagtaactatattaagaggttctgtaaaatccttaagtaccatgagaattgcatataattctgccttctnnnnnnnnnnnnnnnnnnnnnnnnnnnnnnnnnnnnnnnnnnnnnnnnnnnnnnnnnnnnnnnnnnnnnnnnnnnnnnnnnnnnnnnnnnnnnnnnnnnnnnnnnnnnnnnnnnnnnnnnnnnnnnnnnnnnnnnnnnnnnnnnnnnnnnnnnnnnnnnnnnnnnnnnnnnnnnnnnnnnnnnnnnnnnnnnnnnnnnnnnnnnnnnnnnnnnnnnnnnnnnnnnnnnnnnnnnnnnnnnnnnnnnnnnnnnnnnnnnnnnnnnnnnnnnnnnnnnnnnnnnnnnnnnnnnnnnnnnnnnnnnnnnnnnnnnnnnnnnnnnnnnnnnnnntttaaaatcaaatcagaaatcttttctatatatgtctttaactttttattctgtttatgtggcagaaatatccattccaatatagtgtcttccctctgcatcagaattccagatggcaagataacttttatagctatatctgccacgtatggtttcagtatccctttctgtcctnnnnnnnnnnnnnnnnnnnnnnnnnnnnnnnnnnnnnnnnnnnnnnnnnnnnnnnnnnnnnnnnnnnnnnnnnnnnnnnnnnnnnnnnnnnnnnnnnnnnnnnnnnnnnnnnnnnnnnnnnnnnnnnnnnnnnnnnnnnnnnnnnnnnnnnnnnnnnnnnnnnnnnnnnnnnnnnnnnnnnnnnnnnnnnnnnnnnnnnnnnnnnnnnnnnnnnnnnnnnnnnnnnnnnnnnnnnnnnnnnnnnnnnnnnnnnnnnnnnnnnnnnnnnnnnnnnnnnnnnnnnnnnnnnnnnnnnnnnnnnnnnnnnnnnnnnnnnnnnnnnnnnnnnnnnnnnnnnnnnnnnnnnnnnnnnnnnnnnnnnnnnnnnnnnnnnnnnnnnnnnnnnnnnnnnnnnnnnnnnnnnnnnnnnnnnnnnnnnnnnnnnnnnnnnnnnnnnnnnnnnnnnnnnnnnnnnnnnnnnnnnnnnnnnnnnnnnnnnnnnnnnnnnnagaaggcagtggccttccatatgaggcattgttagaattcatttgtctacaatttctcttagtatgtcccattttaccacagttgaaacatctaggttcctggcacctttgtggtctccaggggaaggctcttcctacccaagattctggttcatattaggagtaacctctagtctcttggtatgtatgttgacctctgtaaggtgcttctccttgccaagcccttacatcctcnnnnnnnnnnnnnnnnnnnnnnnnnnnnnnnnnnnnnnnnnnnnnnnnnnnnnnnnnnnnnnnnnnnnnnnnnnnnnnnnnnnnnnnnnnnnnnnnnnnnnnnnnnnnnnnnnnnnnnnnnnnnnnnnnnnnnnnnnnnnnnnnnnnnnnnnnnnnnnnnnnnnnnnnnnnnnnnnnnnnnnnnnnnnnnnnnnnnnnnnnnnnnnnnnnnnnnnnnnnnnnnnnnnnnnnnnnnnnnnnnnnnnnnnnnnnnnnnnnnnnnnnnnnnnnnnnnnnnnnnnnnnnnnnnnnnnnnnnnnnnnnnnnnnnnnnnnnnnnnnnnnnnnnnnnnnnnnnnnnnnnnnnnnnnnnnnnnnnnnnnnnnnnnnnnnnnnnnnnnnnnnnnnnnnnnnnnnnnnnnnnnnnnnnnnnnnnnnnnnnnnnnnnnnnnnnnnnnnnnnnnnnnnnnnnnnnnnnnnnnnnnnnnnnnnnnnnnnnnnnnnnnnnnnnnnnnnnnnnnnnnnnnnnnnnnnnnnnnnnnnnnnnnnnnnnnnnnnnnnnnnnnnnnnnnnnnnnnnnnnnnnnnnnnnnnnnnnnnnnnnnnnnnnnnnnnnnnnnnnnnnnnnnnnnnnnnnnnnnnnnnnnnnnnnnnnnnnnnnnnnnnnnnnnnnnnnnnnnnnnnnnnnnnnnnnnnnnnnnnnnnnnnnnnnnnnnnnnnnnnnnnnnnnnnnnnnnnnnnnnnnnnnnnnnnnnnnnnnnnnnnnnnnnnnnnnnnnnnnnnnnnnnnnnnnnnnnnnnnnnnnnnnnnnnnnnnnnnnnnnnnnnnnnnnnnnnnnnnnnnnnnnnnnnnnnnnnnnnnnnnnnnnnnnnnnnnnnnnnnnnnnnnnnnnnnnnnnnnnnnnnnnnnnnnnnnnnnnnnnnnnnnnnnnnnnnnnnnnnnnnnnnnnnnnnnnnnnnnnnnnnnnnnnnnnnnnnnnnnnnnnnnnnnnnnnnnnnnnnnnnnnnnnnnnnnnnnnnnnnnnnnnnnnnnnnnnnnnnnnnnccttcagctgtataggttgccattcataagccatctgtccatgagggtgtttcttagaagctggcttttctaccatggtagctgggtacactagtggtgtaccagtaacaaccttagaatagtcatgatacctaggtggagtaggattggagtgattctgcttctgaggcatcccaattatctttaagcctggcaatgatatccttttgaaaagtttcaatctccttaatcataaaagattccaagcatgttagtgaatctgtaaatcgctctaactgctcctctacacgtttttctagtccttagacagcatctggatggtatggaaactgtcttctaggtattggagtctagattctcggtcatgatttgcttattttgattcctcagcaatcgactgtatggacctatctaatttgtcagccctgttttgtaaattatcttccaaacatttgaacttagattcaaatttgtgatctgctactttagatgcttcaataattgatggaatggcattgtccaattcttcaaccctatcctgggtattttgcacctttgcatcatctagtttctgggtcacagagcctatctgagtttctagctggctacagatattcttagttcgtcacagtcctctgacagcctagcctctaatgctccagacatggaggatctctctgtgtttatcttatcataaatacactgcatctcatcttgggtaacagacagctctgtctttagtgtactggagatagagcccagcttaacaccctacttctgttccactttctgcacaattgtggcctgacctaatctgttctccaaaacctcattgagtaaagctgttatttcctgtaagcaggtagtgaggttatctttgtccctgttcctgggaactctggctagtaatgttatttgtaccagcaagctaactgccattactgcatatatgcaggtaattggcagattagtgtcctcctcaaacattgaattcacgtaataagcaaagatattaccaattatagaaaatgataaatattccgccatgattttacctgatttttaccccagatgcagtaaatatctttggtcagcaggtggctcaggcgttaagctagtccgcgcagggcccgatggaacccacagcctatcccaaatggggtgcaggtttccaatatcccgctcctgacaaccggatatagtgggaaattaccaatatggagtcaggtagaaatataagggtatttaatagggaaaagccttacttacagtgacctagagtgacctagccagcctgcgtggcagcagtctgtacacaagcccaaaagagaaaccgaaagcgaaaacgcagtcaccctatgtcccctgaccacaccctcacaagcatggtcaggcacaccagtagccagcccctaagaaggcgtggctacagcttcccctagagacagtcatcaaattctcctcaccaaaaaaagcccagggccagatggcttcagtgcagaattttaccagaatttcaaagaagagttaacaccaatacttctcaaattgttccacacaatagaatcagaaggaacattatcaaactctttttatgaggttatagttacactgattcccaaaccacacagagatgcaaccatgaaagcgaattacagaccaatcttcctcatgaacattgatgcaaaaaatactcaataaaatactggcaaactaaatctaagaacacatcagaaaaatcatccaccatgattaagtaggcttcgtcctagagaaacagggatggttcaacatgaaaatccttcaatgtaatctaccatctatcaaactaaaacaaaaagagcacatgatcatctcattagatgctgactaagccttagacaaaaatccaacaccatttcatgataaagatcttggggagatcagggatacaaggaacattcctaaacacaataaaggcaatatacagcaagccaatagctaacatcaaattaaatggggagaaactcaaagtgatcccactaaaatcaggaacaagacaatgctgtccactcactcttatctcttcaatgttgtattataagttctagctagagcaataagacaagaaaaggaaatcaagggatacaaattggaaaggaagaagtcaaacttttgctatacacagatgatatgatagaatacataagagactccaaaaaattctaccaggaaacttctatctgataaacacattcagtaatgtggtgggatacaagattaactaaaaaaaatcagtggcccttcaaatatagatgatatatcggctgagaaaaatcaaagaaacatcacccttcacaatagctacaacaaacataaactatcttgggggactctaatcaaacaagtgtatgacaagaattttaaataagtctttgatgaaagaaattgaagaagacctcagaaaatgaaagatctcccatgttattgggtaaataggattaacacagaaaaatgacaatcttaccaaaaacaatctacagattcaaggcaaatcaaaatcccagaaaaattcttcatagatcttgataaaacaatactcaactttgtatgaaaaaaaaaacaggatagccgaaacaatcctgtacaataaaggaacttctggaatatcaccatccatgactaatgatacagtaataaaaacagcttgggactggcatgaaaacagacatgtggaccaatggaatcgaatcaaagacactggtatcaatccacacacccaagaacacctttgacaaataagctaaaactatcaaatggtaaaaagaaagtatcttcaacaaatggtgctggcataactggatgttgacatgtagaagaatgcaaatagatccatatctatcaccatgcacaaaactcaagtccaaatggatcaaagacctcagcataaaatcaaccacactgtacctagcggtggtggcacatgcctttaatcccagcacttgggagacagaggcaggcagatttctgtgagttacaggccagcctggtctacaaagctacacagagaaatcctgtcttgaaacactatccccaacccaaaaaacctaccacactgaacctcatagaagagaaagtggggaagtagtcttgaacatatagatgcagaagactatttcctaaacagaacaccagtagcacagatactaagagcaacaattaatatgggacctcctgaaactgagaagcttctgtacagcaaaggacacagtcaacaagacaaaacatcaccctacagaataggaaaagagcttcaccaacatcacatctgacagaggactgatctccaaaatacacaaacattcaagaaactagatataaaaagaccaaataatccaactaaaaacagggcacagttctaaacagagaactgtcaacagaggaatcccaaatggtggaaagacacttaaggaaatgcttaacatccttagccatcagggaaatgcaaatcaaaacaactctgagataccatcatacacctgtcagaatgtccaagatcaaaaacatcaatgacagtttatgctggagaagatgtggagaaaggggagcactcctccactgctggtgggagtgccaacttgtacagctgctttggaaattagtatggcgatttctcagaaaattgggaatcaatctatcacaagacccagcaatatcacttttggacatatacccaaaggatgcatactcacaccacaaggacatttgcagaattatttccgtagcagcataatttgtaatagtcaggaactgggaacaacctagatccccctcaactgaagaatggatagagaaaacatggtacattaacacaattgagtactatttagcagtaaaaaacaatgaaatcttgaaattttcaggcaaatgaatggaactggaaaaaaatcctgagtgaggtaattgagacccagaaagacaaatataatatgtactcaatcctaagtggatattggacataaaacaaaggataaccagcataaaggccacaacccatgagaacctaggcaaaaaagagggctctaagagagacatacatggacctgcctagatatgggaaaaagacaagatctcctgagtaaattgtgagcatggagtgagaggggaggagggaaagggagtggggaaatgcataactcaataaaaacaaagttaaaaaatgaaaacagaaagaaaaaccaatcatgcttgggtttagagaaggagagagccacacttcaattccaaagccagctttagtttttaattaaactgggactgtaaacagaccaattgcatcgtatgcctgcagagaagagcagaaacaaacgtttgggaagatttatgaaatattttcctgttggatatgtgatttatcattaggcccgtttactctttttcttgggacattttctctggatgattcatccttttcttcagaagtctcatttgtccaatggtcttcagattccttagttagatgccttcattctcctgaaaaaaaaaacaaaaacaaatccctgccccaacataactttgaggagtttcctttttggcaagttatgtctgatcaaatgaaaagcatttcttagttttataagttagtttatattaaacagccatgctgcttgatggtctatcacctcttctaattaagagatctctcttgttaaaattgaatctttatcaattttgatggtgtccatagcttttcttctgtggaaacaaaagcaaaacctcttcccagtgtaacacatatcctggtctccattctgaggtcaacacatccttaaagtgtacaggctgatttaattcagtagtttttctaatattcaatgtctcttcacagttgttgttctcttctcattagcatttagaaaatttgaagttaataacacattatgcaatctatctctgggggtctctattattcatttctatttattaagcatatcttttagagttcaattagatcttcatataattgcttgccctgtaggattgtgtagtatatctgtgatatgctttatgccataatatccaaaaatctgtttcattttactagagccatatgctggagctttatcagtcttaatttgtgcgggtatacccttgatggccataacttctaacaaatatgtgattacagaatcagcattttcagaactcaaagcagtagcctatttgaaatcctaaatctttacctatgatatggttttaatattttaattttccaaattctacaaaatagaacacatatcctccaaatttcatttctttttttcccaaatttcatttcttagagtactctttggtttacttcctgcaggtagtggagtttggttgtgcaaagaacaagtaggatatttccttataatttctttggctgttgccaagtgatggaaaaatcttctttcaaacccttactattgacatggtgtttttaatgaaatcctaaggcttttagcacatttcctatgaatagttgatcaatttcatcattatcttgtgctagatggccttgtagcctcttacagtagctaatatgtgctatatataaggggtgattactattctgattattgtaattgaatcaatcataaagtcaattctgtatcatctggaataatattcagcaatttcaatatgtaaaacaactctttctgcacattgagagtcagtaactatattaagatgttctggaaaatctaataataccatgagaatagcgtataattcctacttttgaacagcatcataatggctttgatccactttatcctaatttcttgatttataacctgcctttcctgatttgtttgcatcagtatagaatgtacggggtacagaaatcaatgttccttgcatgatatgaagaaagatccagttagttctctttataaaatgatttctattgcttttgggatatttattgttaatatctcctgtagcatgaaaaacaaaagacccagagacagatactggggttcaagctttaagttgaagatcagagaagcaaggcagccaagccagtaggtcttccctctactcagctgaaatgacaatcctgtctccacaaaccctcagaagcaaaagctctcagtttcttcctcctccttttattcctctctctacccagccatatcctcctgtctccacctccctagtgcttggattaaaggtgtgtgtgatcccaagtgctgagatcaaaggtgcttcctgagtccttggattaaagctactacaatttctgctgggtctattactgctaattggcaaaatctcatttttcctttaagaatcagctcagaaacctttcctacataggtctttttttaactctgtgtgataaaaatatccaatctaagatattttctctctgcattaaaattcttttaggtgaatgcatagaaggtaaaataaccagaataaaatctagctctggatccaaatgatccacatgttcaggagtaatttcttttctaccaaagccaattctctctcagcttcagatgataatttttttggactatttacgtccttgtcaccttgtaaggtttgaaataaattatttagttctttagtcattaatccaatcgtgtgatgtagccagttaatgtctcccagcaattttcaaaagtcattaagagtctgaaattgatctctcctgatttgtatcttttgggattaagtttttttgtaatcctattttatatcttaggtaattaatagaatctcctctttgtatttttttcaggagcaacttgtaattcctcacaaggcaaaattttcttcttcaaacattttctctaaggtgtctacatttgaatcagctagtaaaatatcacccatatattggtaaattatagattgaggaaactgtatactaatcattttcaacagctgtcatataaaatattgccacaggatggggctgtttaacatcccttgtgggggaatcttcctctcatatctcttaactggctgagaatcataagcagacacatgaaggcaactttttctctgtctttttcttgtaaaggtgtagtgaagaaacaaccttttaaatcaataactgtaagaggccatcctttaggtaatagagaatgcaggggaattccagtctgtagagagtccattagctgaattactttgatgactctcaaatatgtcaacaccctccattttccagatttctttttaataacaaatacaagagaattccaagtactggcctattcttcaatacgtttagcatttagctgttcctgaatcagctgttctaaggcctgtagttcttctgatgtcaaaggtcactgttttatctagacagatttgtcagttaaccattttaaaggtagggatgtcagtacctttgaaaggttagcagtcattttgccctgttgttttacaacctgaaggttgatgactgttctttataatagcttttaatattttccccagaaatatacattagtttatggtttgtttctgagactggaggaatgttaatttgggtattccattgctgtaaggaatcatgcccccatgaattcattgctggttagctaatatggctttaattttcctctgtccttctggccctatacattccacccatcttgtgcttaattttacatgagataaagttccaatccctaaaagctgaacatttacttcctgaagagaccaatttgtatgccaaggttctagtgcaattattgttacatcaacacctgtgtctataagacctttaattacaatgccatttattcatatttttagttttggtctttgatcatttatagaagtttgccaaaatattttctttatgctttctcctgaaacttttgtcttatcttctaaagctgttctattatccagagcagtatggtttttataataggcattaggtcctttaattgctctggggaggactttccccaactgtgacagagaatgacagaacccagtttggcatgggggactgcaagaagccccctgaggcatttcctaacgacaaagggttaccttgtctgtcccttgttgatctgcattcattggtccaatgtcagcctttggcacactttctgcatactccaaaaggcaggggccttatgtctggattaaaagaaacattgtttctaagaatgccctgtctacaatccctttttaggtgaccttgtttgccacaattaaaacatctgacattttgatttttcttcaagcctctggaaatcacctgtcttatccaattttcatcgtggttatgatattcagtattgactacatcttgggtccattcctctatgggtactgatcttgcctttaaaggcctaattatctttttgtattgtgaataagcattttcatgagctagagattcaattattatttgtctagcttctgaattttgtatcattctatttacaactgaagtcaatctttgtagaaaaatatcagtgaaggcttcttttgggccttgtataactttagtcaatgactcatatctctttctgagttctttaaatctgtctcaagcattcaaagcagctgtacagcacatagccaaggtgtggtcatcatatagagactgtctttgtacatcagcataatcaccctccaagaatttggtattatgaaatttcaatacctctagccttactttgttgttcaatggtcctactctcatcttttcaccaggttctccactgcaatttaggactaggctccaaaattgctgtaactcagtcttttcagtcttgtgggacaattctgtcactaatcgacaataaatttaacatctgcttcacaaatggtgaatgcatgccatatgagactattgcttccttaaattgcctcgaatctaacatttccacaggaatccagttggatcttacacaaccttggggatatctgtcatttggcagttgttcctgtaaagtgtctggataaattaaagttgtttgataaccttgggctgttcctctccaaccttataatgtaacgtttgaggttggtactcctctaaattcttctgtctttatgtgaatatctcttgaggcttgtaacttatcaatcaaaatgccattattttctccactaaatttttctaaaccctgtatcttggcattcatatcaaccaacttggcactcatatcaaccaatttttagggataaaacaagaattatcaaactaataatgttggccgggtgttgttggcacacacctttaatcccagcacttgggaggcaaaggcaggcggatctctgtgtgttcgacaccagccttgtctacaagagctagttccaggacagcctgcaaagccacagagaaaccctgtcttgaaaaaaccaaaaacagtacaaaccattaatgtttagaattgacattacataaatcccatctaagttaattatcccctcatttaattgttccatttaaaccatccattatgtaatcataagagacctaactcccttcatagcagtgtttccctttttaaaattttattttatgtatatgagtgctctatctgtatttatgcctttacaccagaagagggcatcctatctcactacagatggttgtgagccaccatgctgggaattgaactcaggacctctggaagagtagccagtgttcttaaactctgagccatctctccagcctgtgtttctcatcttttaatgtgggaaaaaactttcttttttaaaaagtaattatcccctttcaaaatttccaattgtctcaccaaatctgctgatgaagatggtggactgtgaggctagctgccctggtgtatcatgtctctcaggagaataaagacaatgaacagcctgtctgagaacagctgccactgaatgagtgtcatcagcttgaggggggggggaatccagggaaagcccacaacacacaggaaaatgaagccagagagccagatgtctgcatgggggatcgtgcaaaaatggctaactctggtggtgtttggaacccgaatacctatggcatttgctgtagagaggctgcaacagaaaaatcacacactcactcagaggtcttgggaaaaaaaagaaaacctagccggcagggcagtgactttggtgggaggaccctttgtgtgatggcgattgcaaagccatgggcaagcagctttttcatgaattcgtgtgatggggaaagtacttctgtgtatgtttatcttattgattgttgaataaaatactgtttggccaatgagacagcaaattagacggaactaggagtcaaaggattctgggagatgtagtagagaagtagtgatccaggcaggaagtgacatagcaaggagactcatatttaagcgaaggagaaacaggaaggggccctttttcccgttcgactcttccagcagcaggtggtgagccaccggcaaggagggacgccaataaggcgtccaataagataagtcttataaaatatatagatgtatgataattgagactgagctaacagatgagaatcctagtcattggccaagcagcattgtacctaatacaagtttctgtgtatttatttggccctaactcaggcgggcggctggtataaagctcacacgtggcggtggggctcaggcagcttttggcggaaagatttatcgtaacattagtgtctcccaaattggactccagatgaagtgttaatctaattaatcttataaataaaagccaggagttggatattggggttaaaaacctggaagatcagagaacccggagcagctgccagttgcttcctacctgtctcattcctttacccaaaaagctgagatgctgtctccaacccacctaatcacttcctatatctacctccccagtactgggattaaaagcatgagccaccactgcccagattctatggttaacgagtggctacctacacccactgatctccaggcaagctttatttgtcagaacacaaagtatcatacaacactgcatccagaacaacttcaaagctactagctgagatggtccagcctcacagtgtattccacctaggacttcagataagctctatactttcctatcacacaaagactaaacaaaaaataatacagctagctctctcaggacttgactattatccagatttcttcaagatcccctaaagatgctgtagcccccagacaacaggaagtaactttaataatatgacacccacattcccaaggattggggtgggtggtttttggtcatccagttgggttatggatgtttatcatcatttaggggggttagttacaagttgttgttagtcaaagtcaggaaaaatgctgaacaaaggaaattagattcaggagtctcattttctcaagaaaaagggggatatagaaatgataggataagagggtagattagtgaatctactttcaaacaaaaaagcaactactagtctcaaatattttatattggtgtggacttttgtatattgatacaaatttaaggttaattttgttagaaaagtctctgtatatgcttctactcttgctcaagatatttttgtacattgatacaaatttaaggttatttttgttatactgtatatatgtttctactcttgtttaaggtattgtatgtatgcagctcattttaaaatgtaattaaagttttagtctttaaaagatatttaggataataaataaagacaggttagtaatggtctataataatcaaacttatagtcaggtatgtttttaaggttgaacagagattatattttagatagatgatctccaaacacttcagagacctacagaatatggcatttgaactgttttaataacatagggttttcatgacagtgagacatggctgctcctggtagcaccaatctatttcatgaaaggatgatgggtatcaaagaacctctatatggagtttgctttctatgtggcaaagccagccactggacaagcaactacctttgccttgactactggcaatatgctgtccagattggacaagcaggacacaaaagaaggcgactgcggaactttgccaagacaaagtaggacagtccttcaaattatcctgcttcacaaaaagtcgtttatacattctaggcctgtaggccaaagattggtgcaccaatgttacagagaaaccttgggtgactgtccagacagccagatgtttctgtcatttctatagttttggaagttgtttgctctaaacttcctgtttacccaggtaatattttatccttctcaggtctttgatggtgttaaagactagatagttttagttttacagttttccttgttaccaaattgaaaaaagaaacttacataagacatgtgaaatttataaggttgagaaacataaaagcttaagttgtttatctaagatgtttttggtctaaaaagatacttttaggatggtaatacaagctatgatagaaagtggtttaggtataaaatcttggattcagtaagataggatagataacagaatgatttctttgaattttccaaatgcaaatggattagacattgtgaacgtaatccttacataactattattattatatatagtcttactatgtcaaagttaaaaaacctttcctttttattcagacaaaagagggaaaggttgtggggtatctgtacactgtatgaagatgtattgctgtgattgataataaaaagctgaatagccaatagctaggcaggaagtatagctgggatttctggggagagaaaggaagaggaagagaaatctcagcacacagaagatgccaggagacatggagaggaaacagaagggggaagacgaaaaagaggtaatgccatatgatagaacatagattaatataaatgggctaatttagttataagagatagtgggacaagtctaagctaaggctgatgtatgcagctcattttaaaatgtaattaaagttttagtctttaaaagatatttaggataataaataaagacaggttagtaatggtctataataatcaaacttatagtcaggtatgtttttaaggttgaacagagattatattttagatagatgatctccaaacacttcagagacctacagaatatggcatttgaactgttttaataacatagggttttcatgacagtgagacatggctgctcctggtagcaccaatctatttcatgaaaggatgatgggtatcaaagaacctctatatggagtttgctttctatgtggcaaagccagccactggacaagcaactacctttgccttgactactggcaatatgctgtccagattggacaagcaggacacaaaagaaggcgactgcggaactttgccaagacaaagtaggacagtccttcaaattatcctgcttcacaaaaagtcgtttatacattctaggcctgtaggccaaagattggtgcaccaatgttacagagaaaccttgggtgactgtccagacagccagatgtttctgtcatttctatagttttggaagttgtttgctctaaacttcctgtttacccaggtaatattttatccttctcaggtctttgatggtgttaaagactagatagttttagttttacagttttccttgttaccaaattgaaaaaagaaacttacataagacatgtgaaatttataaggttgagaaacataaaagcttaagttgtttatctaagatgtttttggtctaaaaagatacttttaggatggtaatacaagctatgatagaaagtggtttaggtataaaatcttggattcagtaagataggatagataacagaatgatttctttgaattttccaaatgcaaatggattagacattgtgaacgtaatccttacataactattattattatatatagtcttactatgtcaaagttaaaaaacctttcctttttattcagacaaaagagggaaaggttgtggggtatctgtacactgtatgaagatgtattgctgtgattgataataaaaagctgaatagccaatagctaggcaggaagtatagctgggatttctggggagagaaaggaagaggaagagaaatctcagcacacagaagatgccaggagacatggagaggaaacagaagggggaagacgaaaaagaggtaatgccatatgatagaacatagattaatataaatgggctaatttagttataagagatagtgggacaagtctaagctaaggctgaattttcttttttccctcattttctttttttaaatttacgatttcattttacattccaaccacagttctccttcccactcctcctcccacctcctcatctcttcccaccccccacctcacagcccataccctgtccactcctcacaggtaagggctcctatgaggagtcaatatagtctggaataataggttaggtcagggacaggcccctctcccatgcattaagactgagcatgacatcccgccatagggaataggttccaacaagctagctcatgtactaggatttattgtggtccttctgacactgagcctggcatcccaccctaaggaatgggctccaacaagctagctcatgtaccaaattgtatcatggtcctactgccaggggcctctctgatagtccaagcttcacaactgtctcccacaaatggaggacctagttcagttccctggagtttctacagttgtaggtatagagttcatgagtttccatgtgttatgataactcttcccgccatcctggtcctagtgccttgtcagccccaaataacacacagagactctattagttataattctgttggccaatgtctagggcttcttattggctagctctgtcttaagtattaacccataactactaacatatgtatttctacaaagtctttttaaattttaattgttagtgttttttaatttaaattagaaacaagcttgcttcacacgtcaatcccagctccctctccctcccctcctcccccgcccccaccaactccccccaaacctccacccatcccctctctgctccccagggagggtgaggccctccctggaagaatctccacagactgtcatatcatctgggtcagggcctaggctctcccccgtgtgtctaggctgagagagcatccctccatgtggaatgggctcccaaagcccatttctatgccagagataaatactgatctactacccgaggccccatatattgctgaggcctcctcactgacacccacgttcagggggtctggatcagtcccatgctggcctctcagttattagtctgggatccatgggcaaccccttgttcaggtcagctgtttctgtgggtttcatcagcctggtcttgacctctttgctcatcactcctccttccctctctgcaactggattctgggaattcagtttagtgtttagctctgggtgtctgcctctgcttccatcagctactgaatgaaagctctaggatgggatttaaggaagtcatcaatctcattatcagggaaggacatttaaggtagcctctccactattgcttagatttccagttggtgtcatccttgaagagctctggaaatctcactagtgccagatttctcctcaaacctataatggctccctctattatggtatctctcatcctgctcttctgtattcttctcctgactcaaccttcctgctccctcatgtccttctctccccttctcttctccctctatctttctcctaactccctctccccttccccatgctccgaatcagttcaggagatcctgtcccattccccacatatggaggacctagttcagtcccctggagtctccacagctgtaggtctagagttcatgagtttccatgagcttggttcagctgtctctgtagatttctccatcattatcttgacctcccttgctcatatattccttcctccctctctttgacaggattcccagagctcaggctggttattgatagtggatctcttcacctggttccatcaactactggatgagggctctatgatgatagttggggtattcagaaatctaatcacagggataggcaagttcaggtatcctctctactattgctaggagtcttttatttttgtttttttaattttaattagaaagaaaagctgttttcaggactatagctctataatagagcttgaaatcagggttgtttgggctatcctgggtcttttgtttttccatataaagttacgaattggggattgggaaaagatattcttggggttctgacaggatatgtcctcagctgaagccgctaagaacactacccatgcacattcactaagttcccttttaaaaggtcccagagagcaagataagagataatgtaatagagggagacattataggtttaaagagaattcgggcactagggaaatgtctggagagctacaaagatgacaccaactaacaatctaagcaatagaggagaggctaccttaaatgccctctcctgataatgagattgatgactaattcatacaccatcgtatagccttcatccagcagctggtggaagtagaagcagataccctcatcaaagacctgagaaggaagataacattactagggtaggcaggaagcgcaggtgagcaacttccaaaggtgcatcgaagacagaaacagcaggttacctggacagtcacccaaagtctcacagaagcagctttggctaaggcctagagtatcggactgaccagcacagaagcatggaggtagaaaggctgtctcaccctgacttggcagggttcagcagtcttctaaattatctcctgcaagtacagtaggacagcatgtccaaagtcatcggtcgaagtggggacaattctttgcacaagaggccattagccaaagagagaatgaactccagaaggagtgacatcggtgcccaacattttctcaggaatagcttggtgctgtcaggagcaaatgcgtctcatgccaacagagtactaaaacatttaaatgccatagtgtgtaccaccaccacctcttagcttctggctgctgggattaaagttatgtgcctagcttgcatggcttgtggctgactttgctttctgaatcctcaggcaaactttaacaaaccattaatagtataccaccacagttgacattcagttattccagcaccatttgttgaagatgttttccttttttccattttgccattttgggttctttgtcaaaaatcaggtgttcaaaggtgtgtggattaatgtcaaggtctttgattggattctgattctgtatttttatctctagctagaaatgtcccttttctttctcttgatgttttcttcctaactctcttaatgttttcctcccaattctctcattcttgatggtttccttcttacttatatttattcttccttattctctcattcttgatgttttccttctgctccttctacttctttcttattcttccattcttgatgttttccttctaactctaccaatgttttcctcttaattctctcattcttgatgttttccttcccctactttctatttttcccttacagcttatatactccagcaaaatcttttaggcaataataaaaattacaatttggttacattgtgtttttcaagtgaatgattacagtgaatacaagtaaacagcaggttttccatatcccttaacatgattaaacattttgcatattacaggtgaaaaacaaattatcccaagaacccatatacattcatacccaagcaacttgttatagataagcagtgcaagcaagcaaagtattcttttactggaaggctacattttgcagctacaaagaaaagaccaattacttacctcgaaaggtaatcttataaggaatcttttttattttctcttccttttttatttgaattagaaacaagattgtgggctggagagatggctcagaggttaagagcactgactgctcttccagaggtcctgagttcaattcccagcaaccacacggtggctcacaaccactcgttatgagatctggtgccctcttctggtgtgcagatatacatggaagcagaatgttgtatacataataaataaataaataaaatctttaaaaaaaagaaacaagattgttttacatgtcaatcccagttcccacaccctcccctcctcccctatcacctcctccccaggaatcttaaagtaatcacaaacataaacttttatacatgaaagacaattagaagctctactttaaatcgttagggtgcatacccattcatcaatagtttttaatatcatgagatcgagggaaagaataggtataaggaattaatcatcacctttggtcaccaaccaatcctagcaagaaaggcatgtcagctaatgataattgggctgctttgttcttgttccctgaccttaaagagttcctcattcaactatgtgcctttctaaaactttagatgctcttcttgtgtttttcacctcaaagctatttaacaaaacatcttagtctaacttttaagttattttcaaagctttgtttcagctatgatgcactccaaaacctgtgaacacatctaacaaatttaaagttaaaagaatttaaactagctgggctactgggactcaattgtttttcttagtcattaaggaagccacagcctatatggttcctcagtagaaactcatgcattttagctgtgtgacacttccttgttttatttttttaatcatcaaaactcaatttaagaggagagagagcaggatgagagacaccatattagagggagccactatnnnnnnnnnnnnnnnnnnnnnnnnnnnnnnnnnnnnnnnnnnnnnnnnnnnnnnnnnnnnnnnnnnnnnnnnnnnnnnnnnnnnnnnnnnnnnnnnnnnnnnnnnnnnnnnnnnnnnnnnnnnnnnnnnnnnnnnnnnnnnnnnnnnnntatatacactgagctgaaatctggaacctagttgcagagagggagaaatgaagatcaaaggggtcagtaccaggttagagaaacccacaggaacagctggcctggacaagggggagcacatggaccccagatgctgtctgggaggctagtacaggactgatccagaccccagggagagggagagggagagggagtgggagaagggatttacatgtgaaacaagcttgttcccaacttgaactaaaaaaaaatattaaataacaaaagattgaaaaaaaactctatttaaactaacattattattatcaattagacagtacagcttaagaaggagtcatccacaagtaaaactgcccaatagaattggggcatttccatgagataaacatactacattatagacagtgaggatctccccacacccattcacaccattccagataccagagaaagatggcagtggcaagcatgtaaaagcacaacagaagcaaaaggcattttggagtctcagggttttgcctatctgagattcacccattggggattttcctcctgatggggtgacacctcaaacttcaattgccatctgctgttcctctgacatggccaccagaaagaccaaaaaaatcccaatgaaattgactaatgatattctaatgatatgtgtaggtcagaggacaacaggttgcttaggagagttcacacaagttgtcctctgacctacacatatgtaccatggcaaatgcaaacccacactcacaaaaaataaataaatgttaaaaaagtttgtggaaagcctcactgatagaatggttctgtgagggtcttacaagcttcatgatgtgagtttggtccctgggacccacataaaagtggaaagaactaactgactccacaaagttgtcctctgatttctccatatgtgctatggcatgtgcaaccttatgcacataacatatacataatttattaattaataaaacaagaatggatcaagtaaaggacagaatatttgagtttgaagacaagatggaagaattggaatatgaacaagaaaaaagattatccatggccatgctgtgaccagggtctgtgttgatgtcaatggctccttttaccaccaagggctgtgtggatgcctggtgtctgatcagccaccagaaacaagggtggtgtccaaccaacatgctattgctgaggccatactgatctgggtgacctgagctgccacaagtcccatggtgacatctagacctgagctgctgttgagagccatgtcggggttttgtggtcctgtcgaagctggggtctgtgttgatgtctgtggcttgtgtgaccacaggacatgggtgggggtaagcataagaaccatgcatgatgaaatccgagggccaggctgagctggccctgcccttctctggctccgcctcacggaagcaagatagctggccttgaccctcatgggagagctggccccaaagacccaggcacaggagagctggtccattgcccactggagagggcacatctctgaaggagatggtcccacccctcaccatgggcatgggagagctggccatgatgggtatgggagtgggtgtggcagccccagtgaacaagtctaaccagctcaactaccactgaggcccaaatccagggtattgggttggcccacattaatatctatgacctactggagcatgtgaagggagtggtcctatggaaagatacttgcaggatctccatgtcttggggtggacagggaatatctgagagttttggtgaggattcagtgatgatggtgtatcagatatcagagaccttgaaccagaccaatgactcattgcaatgaacatttgcaaacaaagctgaaaggaaaaaaggataccctgtgtgacacactgagactcccagtgccactaagaccaatgaaaaggtgccagagaggcaagaaagacagaggagcaaagtgatttttgtttgtttttaattaaaaaaaatttatggggaggaagatgctgcaagggtgaagggcagatatggagggactgggaaatgagcagaattggggtgcatgatgtgaaattcccaaagaatcaataaagaaattatgttaaaaaagaaaaaattactaagataaattacaagaagatacaaatgcaactttaaaaatattctggatactatgaaaagaccagatttaagaatcaggttctcaaacaggtctaattccattctaaaggcatataaaacattttcaatgaaataacagaaaatttcccaaattagagagatgtaaatccaatataagaaacatttatatcaccaagtatacaagaccagagaatgttccttcctcatattataattaagccactaaatatacagaacaaaaaagaatattgaaagcagcaagagagaagcaaaaagtcacctataaagaaaggcttgtcagagtagctgcaaatttctcaacaaaaacttgaaaagtcagtgagcttggtatggtatttttcatgctttttaaagacaacacttgccaattcagacaactatagccagaaaagccatctgttataattgaatgaaaaaggaaaacttcctttccgccgaccaatcagagactaggtgagtgaccccccctgcttttacccaactcctgtccaaagcgccattcacccagatccccccaggtttgtccctgcttgaaatagacacgcccaggcatggaaaagctccctgaatatgggtacaggccactattccttccgttcccggcgaccaatccgccaggaggtgagtgatccaccactcttacccaactccttatcaaagccccatccatcccgatctccccgggcctgctcctgcttggggtagacctacccaggcagtgaggaacccccagagcctggaaacaccccactcttcctgtcctgcccacacacacccgattcctatggaggcctaactccttcatagtgaggagactacgaggagaggcataaccatccagagcttaagacattgaattcctggcccacacatactactgtgtaacaagaggagatagagagaccctacctgcactcactggaaaaagatatgggaagaagacagaataagaactcgcttaataacagaaagaccaatatgacactaacagaatctagggactccactccagcaagacctgaaaagcccaacatagggcatgaagaagagatggacctcaaaaattatctcagcaagatgatagagaccttcaaagaggaaacaaaagaatctaaagaaacccaagataaaacaaccaaacaagtgaaggaagctcttgaaacagatcaaagcatgaaagttgaattggatacaataaagaaaacacagaatgaggcgatgctggaaatggaaagac

SEQ ID NO: 8 - DNA, 7924 bp, synthetic construct
  source 1..7924: mol_type = other DNA; note = CHERV-1b Genbank Accession No. MN527960
ggccgccgcctccattatacatttgtacaaaagcaaagaggttcccgattaaactgtgtttgaagaagattcctcggtgtggcgtctttcttgctggtcaagggtggacgccgcaagtggtggcccgtacggggaattcagaacttctcacagtcggggcggcgccggtaagttcccaaggtaagtggaactgtaaagtccgcggtgaatgcggagataggtctccggtaaaggagcaccaaggtcctcaggaaagaggagataggtctcagtaaaagagtaccaaagccctcggggaagaggcagtaaagtctccggaaaggagcaacattgttcgcgacaaaagcgaaccgaaagtaaaaacctcgcttctgctttaatttgcagagtgagagtaagttaatggaccccgctattatagtggtgatttggctgctttttaacatagcagtgtgggcttttgttttctggtggtgttatcctacttgcacaccttcggagcgtgctaattaagacaaaagcacaatgggatcgtcacaatcacatccaatttttctggctcttcaagagctacttcattctaacaatttaaggttaactaaagccacattacagaggttcctgagtgaatgcgacaccattgcaccctggtttgcagcctcgggcaatctcactgtggatagttgggataaattagggaaagacctggattttgcctgggagcaaggagcgttgaagccgagtgttcgcccggtttggcgcctggtgcgcagctgtctagaggacaaagggggaaataagaaagctatagcaaatggacaggctgcccttgaaatgctccaagaagaaaggtcagaacagtcagaaagtgagagaacaaaggagaaacagaaaagggataagaagcgagtctatccttctctaggaaggttgaggaaggaattaaaagaaccaggagaggattcagaatcagaggaggatatatgtgaggatgaggacatcatggaggaagaggaggaagagattattgagctcatggaaaaacattcattaaaagtatcagaaaaacagcgtcctaaaatggcgactgtaaagcaagggcaccgccctatcgctcctcccccctactgctcgaaagaggaagtaggaggtcctggttgctccaccttctgtccggaagtgtggcgtacggttcgcactgagtttcgggttactcgaccactggcttatccagtttttacagacggtaaccaacagagatatcatgaaccaattgactttaaaatagtcaaagctctggcagaatcggtacgcacctatggggtgacggcagcttttacaattgctcaggtagaggcgctcggtcgctactgtatgacacccagtgattggacaaatttggtaagagcttgcttatcaccaggacaatatttggattggagagcttttcaaattgagtttgccaatgatcaaggtgcgattaatcgtgcagctggtgatcaatattgggatgtggacatgcttcttggtcaaggacgttttgcacagcaacaaacaggatatcctcctcaagtgtatgatcagattaatcaaatagccattagggcttggaggtctctgcctaacaaaggtgaggtcagtggaaatcttacaaagatattacagggtcctatggaacccttttcagactttgtggcaagaatggtagaagctgcaggaagagtgtttggggatccagatgctgctatgcctttgatcaaacagctgatttatgaacagtgtacaaaagagtgcagagctgcaataactccatataagggtaaaggccttgaagtctggatgaaagtctgtagggagttagggggtccgctgactaatgctggactagcagctgctgtgttgcaattaactaagaaaggtggaggttcaggagcttgctttaaatgcggcaagcaagggcatttgaaaaagcaatgccccgagggaggaaacactaaagtcaataactttgctccgcgccctaagcaacctggcttatgtcctagatgtagaaaaggaaatcattgggctaaggattgtagatcagtaaaagacatcagtggacagcctcttgttcaggggtatggaggagcccgttcaaaaaacggacgacggggcccacgaccccagggcccacaaatatatggggccatggaggatcagaaccaggagcagagtcccgaaacctggccctctcttcgtcatccgagggaccgaggagagccactacaggctccgcggggctggacttacgctccaccaccagactcgtattaactcccagaatgggggtccagcttgttgacaccgattttaagggaccccttgagcctggcacagtaggtttgcttataggaagatcatctgcagcattgaaaggtttacgagtacatcctggagttatagatcctgattacatgggtgtagtaaagatcatggtagaatctcctagagggattacggccatttctcctggagacaggatagcacagttactgcttttgccaagcttgcatgacaagtttccagcacaagccagagagagaggagagggaaactttggctccactggatcaaacttaactttcctagctttagaccttgatcaacgtccaacccttgagttaatagtgaatggtaagaaaatcttaggcttactagattctggagctgataagagcatcatagccactaaagattggccctctggctggcctatacaggtttcttctcaaagtttacaaggtttaggctatgctaaggctcctgatatgagtgctagacaattgccttggaaagatcaggaagggcattcagggaccatgcaaccttatgtgttagacttaccaatttcattatggggaagagatttgttaaaggatatgggttttaaactcacaaatgaatactcagaaacatctcaaggtatcatgaaacgaatgggatacgtcccaggccgaggcctcgggaaacatctgcagggtcgtaccagtcctattattccacaaccgagaccaaagaatctaggtctgggtttttcctaggggccactgagggaggtattcctattacctggaaaacagaggagccggtatgggttcctcagtggccactttcctctgagaaactggaagctgctaagactctagtgcgggagcagctggatctggggcatataaaatcctctgtatctccatggaatactcctatttttgtcattaagaaaaaatctggtaaatggagactgcttcacgatcttagagctattaatcaacagatgcaaattatgggccctgtacaacgtggtcttccacttttaacttctttacctgcatcatggcctatcatctctatagatattaaagattgcttcttttccatacctttgtgtgccaaggattcagggcgttttgcgtttacgctgccctcttgtaatcatgaacaacctgatttaaggtatgaatggatagtgttgccacaggggatggccaatagtcctactatgtgtcagttgtttgtagcagaagcaattgctcctttgagagtggactttccaaagattagatgtgttcattatatggatgatattttattggctgccaaagatgataaaacgcttaataaggcatatacaaaattggtaaaattgcttgagatgcataatttagtcatagcctcagaaaaggtacaaaaggacactgttgttaactatctaggggctaagattctccctcatacaattattccacaaaagatagagattagaaaagataatttaaaaactcttaatgattttcaaaagttgttgggagatataaattggataagatgttatttaaaattaccaaattatgagttgaagccattgtataatattctcaatggtgattcagcattagattcacctaggcagttaactgctgaagccagagaagctttaaagaaagtggagacagaattacaagatgccagccttaaacggctaatagaaaatatggatattcttttgtgtgtgcttccaacattctcccagcctacagctttgctgtggcaagatggtccgttactatggatttattctaaatcctccccaggaaaaactattgaatactatcctgcagcggttgctgacttggctcaaaatgggatacagcaatgtattcaatattttgggaaactaccaattaagatcataatcccttatactgctcaacaagttaagatactttgtggaactgtggatgattgggcaattcttcaatgtggattttcaggagaaatagataatcattatccaaaacaccctctaatgtcattttttaaagaacatccagtcatttttcctaaaatgactgcagcagctcctattgctggagccgcaaatattttcactgatggatccaagacgggctgtggagcctacatgatagagcatcaggatccagtgcaatttcaatatcagcctggctccccccaaattattgaatgtaaaattgttcttgaagtgtttagaaattgcccgttctcctttaatctgatttctgattcggcatatgttgtgaatgctgttaaggccctggaggttgcaggacctattaaacctaatagtacagtttgcaaactcttacaggagttgcaaaagttgatctggcatcgcgatcagaaattttttatacaacatattagagctcataccaacttgcctggacctctatcaaaaggcaatgagatcgtagatctctgtactagaggggaatatgtatttttcgcttcctctatggaacgagcacagcactttcacaaacaatttcatgtatctgcaaaaactttacagcaaaggtttcagctatctcgagcagaggctagacagatagtattgaattgtcaacagtgtataaccttcttgcacccccctagcctgggggtcaatcccagagggttattgcccttgaagatctggcaaatggacgtaactcatttttcaggatttggaactcttaaatatatccatgtgtctgtggatacctgttcaggcatcatccatgccacccctatgagtggggaaaaggctcgcaatgtcattggacattgccttgaggcgtggcctgcctggggaaaacctcagcaattaaagactgacaatggtcctgcttatacagctcaatcttttacctccttctgtaaacagatggaagtccaattaaaccatggcctgccttataatccccaaggacaaggaatagttgaaagagcccatcgcacattgaaagaatgtttattaaaacaaaaagggggaataggccatggtagaacaccaaaggaacaactatctttggctctctttactctgaattttttaaatttggattctcaaggcctttctgctgccgataggcaccagactcgggcacctgctcagaagggctatgtaaaatggaaagatatccttacgggtctatggcatggaccggacccggtattagcatgggcgagaggttctgtttgtgttttccctcaggatcagcaagacccggtgtggattccagagagactgacgaggaggtgcaacaaacaagatgaagcctccgatattgatcctgctgctgatcttgacaacaccgtggctgatccaggccagagaacaaatcctgtgggccatagcgaaagcgtggccaattcctttgcctgttcatagcacatctaaagttttgcctgttttcttttctactagttgtgaattgggtttgccttgtgtcaatttagatcctgacactgcccagtattcagccactaatatttctctcaatggagcattatgcttctcccttattaataattctaacccatgcatttggttgaagaatggttctattggcaattggcttgatcctcttactaataaccagatctcgagtgctatgctcactgaagccctgtctcagtttagtacaggcgctagttctggctctggcactggtacaaatggaaccaaagatgtaaatatcactacatttctgatgctgatggaggggctccgaccctcaaattcacgctttagtcaagagaactccactgctcgacaagtcttgccttattgtgcacccaatcgaggctatccacctcattggacgccttgtcagagtccggatcacaaacttaagcaaatagctccaggttttgaatttactccccctcttggcaagtaccagtataacctaactcagggaggttcccaaagaacaggcagtaaaaatacctggccatggtttcaatgggtactctccaacgagcgtggagcatttacttctcttgaaccttttgcagttctccagaatctctgcataagacttcttaatgtttctggtacaagggatgagaagggaccttctcttaagaatctatcaatacataaagctttgaataatctcactgttccagctagcccagtatgcttaaaagctccttttttctttctgctctctaatgctactgatgctaccaaagaagtgatctcgtgcaattcgactgatgtctcctgcattgctagccaatgttggaatggttctgctaatacagcagtagtgatgaggattcctatgtatgttcctattccagtcaaagtggatacaggaacgtttcccattacggaaatcatcagaaccaaacgggattttggcataactgcagcattggttactgccattaccctttctgcagcagcggctacgactgccgccgttgccatggctgctcaggtccaatcagctgagacagtcaatgatattgtggaaaaaacagctacaacattaactaccttgagatctattgatggccacttaaaagctggcattctaactgtgaaccaaagagtggacctgttgcaggaacaggtggatgatttagtaaccttaacttccataggatgcattcattccttttcttctttgtgtatcacctccaggatggccaataatttcacggagaacagcaacctgagttggcagttgagtgcctaccttcagggaaattggagtcaacagttcgagaacctgacagacaccctgacacaacagattattgccgtgaatgctacacgcctgagcctgcccactgttaataccctcttaactacccttaagcgagcctttagtttagttaaggaatgggctggaataggggttatgttttccatgatgctgttagccatttttgtttgcttgtggtgcctatgcaggatcaggaagtcgcaaaaatcccaagctgctatgttggtacaggcctttgctgctgtggaagcaggacagtcccctcaagcatggttatccatgctgacagacaaatagatgtctgtctcgcccttgctgagtgagtgatgcgtatctgaatcagtcatgctcaatgacgggcacctaccctcatgctgagcgaataagcatacatgtgttcccttcaacctaagacatgagcctgtgagggcgacacagtgactctttgacgggtaagatagggacactggggttgaacctaagacagagatgactgaaatctgacaacagatagatactgctactcctataatattaaaacaaaaagggggaactgtagagagctgcagaaaaccgcacccaaaagatggcgctggtttccgccttccgccagcccgacggcgagcgctctctgtggtaaacaactccaaatatggtagaggtcatgtatcctcttaattctgcttggagacaacctatcctggcgcgccacgtagggttaggtgattggtagatgtagactatatcaggccccgtctccctcggcctggggccgccgcctccattatacatttgtacaaaagcaaagaggttcccgattaaactgtgtttgaagaaga

SEQ ID NO: 9 - DNA, 8704 bp, synthetic construct
  source 1..8704: mol_type = other DNA; note = CHERV-2g Genbank Accession No. MN527961
ggcgcttagccacacagaagctaagtcgcccgggtacccgtatctccaataaagcctcttgttttttgcatccagttcgtggcctcgctgattcctgggtgtgtgggtctccctctacgaaagtgtctcttcgggggtctttcatttgggggctcgtccgggatcgagacccgcccagggaccaccgacccacgtctgggaggtaagtgttgtgcggatccgctgttttgtcttgtctggtctgagtctgtcttgtgaaattgcgcttgcgtttgtagtatacagctgtgtacatttgtaggcggatccgaggagggactgacgggtccgaactcccgaccgcggctccaggagacgtcctggtagcgtttgaagccctcaggaagagggatttgtattttgaacttgggaagccctcaggaagagggatttgtattttgaacttgggaagccctcaggaagagggatttgtattttgaacttgggaagccctcaggaagagggatttgtattttgaacttgggaagccctcagggtgagagatttgtactttgaacttagatctatgactggacattttcccagtctctttggagaaggccctcggcttgagggatttgcaatctttactggggacgaggaaggagggcccccttcctcgactctctctcaattccttctgtcgactctctgtcgaaaccgcgctgcgaaagtctgttctgtgttattcggtctttgtcttgtagctgtcatttgtgccctcctaagcctagaaactatggggcaaactgtcaccactcctttgtccctaacactctcccactggaaagatgtacaggaatatgctcataaccaatctgttaatgtgcgtaaacgcaaatggattactctttgttcttcagaatggccgacctttgatgtaggctggccgcgagatggtacctttaacccccagactatattccagataaaagagaagattatggatcctggaccacacgggcatcccgatcaagtggcttatatcgtcacttgggaggctttggttcaggacccccctccctgggtacgtcctttcttacatcccaagggcccctctctccttcccccctctaaccgctccaaccgacccattccttcggcccctacacctcccactcctttgattcctcccaaccccccttcccattccaacctttaccctaccgtgatgaaagacactaaggctaaagaaaagaagacacctaaggtactccctccgggagaagaccagttggttgatctattaacggaggagcccccgccatatccgccactgccgcccccaccagaggcagaagcggactccgccgctgccttggcggaagcggcccctgacccttcaccaatggcttatcgactaagaggtcgtagggagcagcccgttccagattcaaccactctgcccctccgaactgggctgaacggccaacctcagtattggccattctcagcatcggacctctataactggaaaaataataatccttctttttctgcagaccccgtgaggctgacatctctcatagagtcggtactcacgactcaccaacccacctgggatgattgtcagcagcttttgcaggtccttttaacctcggaagagaaacagcgcgtgctactagaagcacgaaaaaatgtcccaggagtaaacgggcagcccacccagctacccaatgaaattgatgcggcttgccctcttgaaagacctgaatgggattttaccaccgaagcaggtaggacccacctgcgtctctatcgccagttgctggtagcgggactccggggggcaggacgcagacccactaatttggcccaggtgaagcagataatacagggtgcggaggaatcacctgccgcttttctagagagattgaaagaagcgtacaggatgtatactccctataatccggaagatccaggtcaggccaccaacgtttctatgtcctttatttggcaatcagccccggacataagaaacaagcttcaaaggctagaaaatctacagggatatacactccaagatttgttgaaggaagcagaacgtatttttaataagagggaaacacagacagaaagagaagaacgttggaggaaggaaactcaggagagagaggaaagactaagacaggaagctgaggaaaaagaggttgcgagagaccgtaagcggaataaagaaatgagcaggttattggccacagtagtgacaggccagagacagaatagacagagggatgacagaagggggccccacctggacagggaccaatgtgcttactgtaaagaaaaaggacattgggcaagagaatgccctaagaacccccgggccaagcttccaccgccaagggtttctgacctcctgaacctagaagattagaggagtcggggccaggagcccccccctgagcccaggataacactgcaagtcggggggcatccggtcaccttcctagtcgatacaggggcacaacattccgttctgaatcggtcacccggacccctgagtcacaggactgcatgggtacagggagctacaggcggaaagcagtaccattggactacaaatcggcagctccagctcgcgaccgataaggttatgcattctttcctccatgtgccagactgcccctaccccttactaggacgggacctattgaccaaattaaaagctcaaatacactttgagaggtcagaagtcaaagtcacagggccagagggaattccccttaccatcttgacaatgtccatagaagatgaatatagactccatgaaaagaggactaattcgaacaatcaggaaacccttgatcactggcttgcggaatttccccaagcctgggctgaaacaggaggaatgggccttgccattaaccaggccccaattatagtaaccttaaaagctgccatccttcctgcatccgtcagacagtatccaatgcctaaagaagcccgcgaaggaattcggccacatattaaaaggttacttgaacaagggattctggtgccctgtaaatctccttggaatacacccttgctacccgttaggaagccgggaactaatgactaccggccagtacaggacctgagagaagtcaataaaaggatagaggacatacaccctactgtccccaacccttacaatttgctgagtggattgccacctaactatacctggtacacagtcttagatcttaaagacgctttcttctgcctccgcctgcatcccaccagccagcctatatttgcctttgaatggcaggacgcggcccttggaatctctgggcagctgacttggactaggctacctcaagggtttaagaacagccctaccctttttgatgaagctttacatcaggacctggcagaattccgggttaggtaccccgctctaatcctcttacaatatgtagatgacattctcctggcagccaaaaccaaagggaaatgcaaggaaggcactcaagccctcctccagactcttgggagcctagggtaccgggcatccgccaagaaggcccagatatgtcagaaacaggtgacctatttaggatacaagataaaggatggacgtcgatggctaacggaagcccgtatgcgagccatcttagacattcccaccccacaaaatccccgccaactgagagaattcttgggaacggcaggcttctgccgcctatggatccctgggtttgccgaaatggcggctcccctctaccccctcactcggccaggggttgcttttaaatgggaagagccccaaaagaaagccttcaccgacatcaaaaaggctctccttgaatcaccagccctgggtctaccggacttagctaagccatttgaactttttatagatgagaaggagggctatgctaagggagtcctcacccaaaatctggggccttggagaaggcccactgcatacctctccaagaaattggatcctgtggcatcgggatggccaccctgccttcgaatgattgctgctatagccctgctggtaaaagattctcacaagctaaccttggggcagcctttgaccatacatgcccctcatgcagtagaggcagtcatcagacagcctccagatagatggcttactaatgcccgaatgactcattaccagactatgctgttagacaaagaccgggtccacttcgggcctttggtgactctgaacccagccaccctgctccccctccctggggagcccgaggctcatgattgcttacaggtattggccgaggcccatggagcgagatccgacctgactgaccagcctctacctagcccggaccacatctggttcacggatggaagcagctttttgcatcaaggagaacgaaaggcgggcgcggcagtcaccacagagaatcaggtcgtctgggcccaggcactcccccctggaacttccgcacagagggcagaactcatagcactcacgcaggctctaaaattggcagaaggtaagaggctcaccgtgtatacagacagtcgttatgcctttgccactgcccatatacatggagaaatttacagacggagggggctgcttacctccgaagggaaagacattaaaaataaggaggaaatcctcgctctcttaagggctcttcatctgcccgctgccttaagtatcatacattgccctggacaccaaaaaggggattctttcgaagcaaggggcaatcgaagggcagacttggctgcccgagaggcggccctgaccacagacaccactaacctcctggctctagagcccaccaacgaccatcccttcccctcatgggactatgaacaaagagacatccaaaccctagagaaattgggagccgcaaaggaaccaaacggggattggacttatgaaggaaagactgtcatcccctaccgggtaaccaagtacctagtgacatttttacataagatgacacatctgagctccaagaagatgcgggagctcctcgaacgagaagaggaattcaatttccttttggggaagaacgatattctaaaacaggtaactgagcaatgtgatgcgtgcgcccgagtcaacgcatccagactgaagcttcctcccgggaaccgggtcagaggctaccggcccggaacacattgggagatagatttcactgagattaaaccaggaaaatatggatacaagtatctattaatttttgtagacaccttttcaggatgggttgaagccttccctactaaacatgaaacagccaagatcgttactaagaaattgcttgaagaaatctttccccgttatgggatgcctcaggtattgggaacagacaatgggcccgccttcgtctcccaggtaagtcagtcagtggccaccttattggggattgattggaaattacattgtgcttatagaccccaaagttcaggacaggtagaaaggatgaatagaacaatcaaggagactttaacaaaattgtcgcttgcaactggcactagagactgggtcctcctactccccctagcactctaccgcgctcgtaatacccctggaccacatgggctcacaccctttgagatcctgtatggagtacctactcctatcattaactttcttgatcaagatgtctcagattttgctaactccccttctctccaagctcatttacaggccctccaactagtacaacgggaggtctggaaaccccttgctcaagcttataaagaccagagggaccatcccaccatcccccattcctaccagatcggggacactgtttgggtccggcgtcaccaggccaagaaccttgaaccccgctggaagggaccctacatcgttttgcttaccactcccaccgcactcaaggtagacggcattgcagcttggatacatgcttcacatgtaaagccagcccaacccaccgattcagccactgcatcagaatggaccgcacaccgcactcaaaatcctttaaagataagactctctcgtacaccctcctgttgattggttgtctgtttaccccccatgtagcaactaacccccacagggtttataatatcacctggaaaatagccaatctagggaccggggaaatagccaacctcagcacttatatagggactctacatgatgggttccctcctctctatgtcgacctatgtgacttagtagggtctgattgggatccctctgaccaggaaccattcccagggtacggatgccaccaccctgggggaaggataggaacaagaagcaaggatttttatgtttgccccggccataaaccaactcatggctgcggggggccgcaggaagggtactgtgcaagatggggatgtgaaaccacaggggaggcttactggaaaccctcttcctcttgggatttcatcactctcaaacggagggagatcccagggtacgcagggaaaggaccatggagatgtgggcaaagagcctgcggaccttgttatgatagtgccggagggggaggttttcaaggcgccacccccggaggaaaatgcaaccctctcatcctaaggttcacagatgctggaaaaagaactacttgggatagtcctaaggtctggggactcaggctgcaccgagcagggaaagatccggtgactttattctccctgtacagacaaattactcccctaagccaacaatcagttgggccaaacatagtaatagcggaccagagatccccaacccattttcaagtccctaaaccccctaccgttcctaaagctatcactcctacaccaggtgctgtcaccttctcccccaccccagatgccctaaacatcgagataaccagagaccctccaggtaccagagatagattattacaattaatccaaggagtttaccaagccttaaatttttcagaccccaacaagactcaggaatgctggttatgcctagtttcccggcccccatattatgaaggcgtggcaatactgggcaactactccaaccagacctcagcacctaccagttgcggagctgctatgcagcacaagctcacaatatctgaggtctcaggaaaggggctatgcataggcaggattccttcctcacatcaagaattatgtaaccaagtagagccattatctcaggacagccgataccttgttgccccttatggaacttattgggcttgcagtactgggttgactccctgtgtctctaccactgttctcaacaccaccattgacttttgtatattgatagaactttggcccaaagtcacataccaccaacctgaatatgtttacagcgtactagagaaatcaacccgatataagagggagccaatatcctttaccgtggccctattattaggaggaataacaatggggggcatagcagccggcatagggaccggaaccgttgccctacagggaattaatcattttaagcttctacaacaagccatgcacacggatatccaggtcctagaagagtcagtcagtgcactcgagaaatccttaacatcactctctgaggtggtcctgcaaaacagacggggattagatttattatttttacaggaaggggggctatgtgctgccctcaaggaagaatgctgcttttatgcagatcatacaggaatagttagggatagcatggccaaacttagggagaggctaaaacagaggcaacagctatttgagtctcaacaaggatggttcgagggatggttcgctaaatccccctggttgactacccttatatccacgctcatgggacctctggttattctatttttgatcctcatatttggtccctgcattctgaacaaactgactcaattcatcagagaacgactatctgttgtacaggctttagtcttaactcaacaatatcatcagctaaagcaaatagatccagagtatctagagacctctgaatgaaagattccattcagttacaagagaaatgggggaatgaaagacccctgtcctttagccctttctttctcaagtttgtctcctcttcctcctgtcggcggcttccccgatccccacccccggtggcctttccccgcccggcccgagaacaagcaccgggtggggccggcccgagaacaagcaccgggtggggccggcccgagaatgagcaccaggtgggccagcccgagaacgagcaccgggtgggctggcacgagggcgagcaccaggtgggtcagcacgagaacaaacaccgagtgagccggcctggagctctgcccctgagcccccgccccgcccgaagagaaacactccatcccaaggtctccgcccccaaggtcagccatcaggaaggggggggggaattgagtctgctgtactagacaccagaccttgagaatatgctgatctggaatggctctgtgtctcatttgaaccatccaatagaaataattctgtatttcgcctcatttgaaagactctgtgtttcacctcatttgaataactctgtactttgcctcatttgaataaccctgtatagcacctcatatacattgaccaatgggaatagctctgtataatgcctcattagaattatccaatagaatccctgctcctagcttgcgcctttttcctatataaggaccccttttcccttggctcggggcgcttagccacacagaagctaagtcgcccgggtacccgtatctccaataaagcctcttgttttttacatcca

SEQ ID NO: 10 - DNA, 59558 bp, synthetic construct
  source 1..59558: mol_type = other DNA; note = ETC109F genomic locus
tggttctatcgagacagctacatccgcttctccacacagcccttctccctgaagaacctggacaagtgagctttccctccacctcccttgactgcccaggctagtgaggaggtcagcagacaaacagaacagtgggctctgcgggcagggaaggcaggcttttcgccgccactcatcctctgccctgaaggagcttgccaagagggtgcccttgggttaccgaaatgagcaaaacaagaactcctgctaatcaagggcttacatcctagcaatgagcttgagtaatcatggctaacatgctagaaggtgatatgtgttaggaagaaaatgtagatctgggtaatggcagattaagagaaacttgagaggggaaaggcaacttgcagtttgctcttgggatgagaggaaaccttgaggagacctgggttcaaattctatctctgcagcatccagattgtgttcctctagagacatgaaaagagacttaagcctcagtttcagttagagcccagtggtcccatctgtaatcccagcacttgggagtctgagtctgaaggattttgaggtcattctgggctatataatgagacccccactcaagacaaaacaagccaggtgtggtagctcctaactgtaatcctagaacttggctaaggcaggagccaaaatcaagccaggtacggtattggaggcccgtgatcccagtgcttagaaggtagaggcaggacaatcagttcactgtcaccctcagctacatgccaagttttatctaacctgggcaacatgagaccatttcatagaaaaagaccagcctccgtttccacatctgaagactggagcagcaatacactgtagctgcttatcatcaagtacttcacatgtgataagttgttcctgcttggttataccacagccacttctcaatggctcacaatgaagtgagttattgccattttaaaaagagatgagaggggcaaaggttaaatgacttgcctgagatctcatagttgatcatcggtgaagctgggatttgaccatccagggtcatcgtccccctgccacacataggaatggtgaactgaaactaggcccaaagcacttgatacttactgtggcctgcaggcaacactggagcattctgagaaatgactagccctggccgtgggtgaatagggagtggggcagggagtgggggtggggtggaggggtgcagcttctgtgcttctgtcctgttgatcttccagcaggggcccctctcagttgagatcccctagacggctgaccacagggttctgcctgcagccctgaggttgggctccagggctgagcctgtgtctctgatccactctagctctgtgcacctatgtaacaattccatccagagatacctggagacctcctgtcaccggcaccggatgctgccctcggacaacatgtggtccagccagaggtttcaggcccacctgcaggaaatgggtgccccaaatgcctggtctagtgtcattgtacccggcatgaaggctgctgtgatccatgccctgcagacctcccaagacactgtgcagtgccgaaaggccagctttgagctctatggggccgactttgtgtttggggaagacttccggccctggttgattgagatcaatgccagccccaccatggcaccttccacagctgtaactgcccgcctgtgtgctggtgtgcaagcagataccctccgtgtggtcattgaccggcgactggaccgtacctgtgacacgggagcctttgagctcatctataagcaggtgagatgtcccagcacctcccacaggcaaccctacagcaaagccctggctggggtctgctgtgagacagagttcaagactgactctacacacggggcatcttaacacagacacgtcccactggcctgtctcctcatctgtggaagatactgtcctttgagagccattaatgccatgagtttgtagtcataggtagtattttcagaggccctgggacctgctcagtttccatggtaattccaagcctctaggtagtaaccttattctctcatctgtaaagtaagactgtacctggctcctcctttgtgtgctgtgagaatgggtggtttgatcttcacacaagggtttgctaaagtaccaagctggaggacatagaggatatgaggccatgaacctcaaggcctgcctatcaagagttaattattagtgtctatcattgttataacgattattatgttactcatcttcttccaaaaacagatttgatcttgcttatttataataagtatagaattgcttggggtttttgtttttgtttttgtgggttttgttgagatagggtttttctgtatagctttggatcctgttctggaacttgctctgtagaccaggctggccttgaactcacctttgactgcctctgcctcccgagtgctgggactaaaggtgtgcaccaccattgcccgacctagaattgttttttattcagccaaaaaacattaccttgccctcgtggtctaattctctctagaaacacccttaggagcacaccaggggcatgccctatagaaatcctaggttttctcagtccagtctagttgacaactgatattagccaccacagctggacatggggctccaccttccacctcccagtatttggaaggctgagacaggggatcacttttagttcaagggaagcttgggttacacagtgagttccaggctagcctgggcttcacagtgagaccctacttaaaaacatcatacaaacaaacaaacaaacaaacctttaaacgtatgtttttaagggtttctgaattctgaggacagtttttaagatctttgagctaagattcaccaaggtctaggtttgctacaggaagggaaaacactgatcacctgacctgggtggcctcatgtttcctacaggtcctgatcaccttagaataatgtgctggcaaagggttccgtctttgttagggatgccatcactaggtgtccagggtggaatccaggcctgcgtttttagcatgtgcagttctactgagctacacctccagcctaaaaaatgtaaaggaggagatgcatgcaggtgtgcatacacctgtaatccctgggcaacagaagcaagaggactgtcacaggttcaccaccacctggttacagggtttataataaggtcctgtcacaaacaatgtagtcttggaagagaggagaggaaatggggaagaggaagtaatttgcagtttaaaatagagcaaaattgccgggcgttggtggtgcacacctttaatcccagcactcgggaggcagaggcaggcgcatctctgtgaattcgagactagcatggtctacaagagctagtttcaggacagcctccagagctacagagacaccctgtctcaaaaaaaaaaaaaaaaaaaaaaaaaaagcgaaatttgtatggacatggcaacacgtgcctgtaatcccaacacttagggggctgaggttggaggatcaggagttcaaagttatccttggctgtatgtgagcttgaagccaacctgggcctacagcactgtctgttccacaatctgtctttatctgtttgtctccttatgttgttcagctcggtctgttctctgaatgtttgtctcagaacaaacaaaattgaatagggctgggcatacgcacttttcaaatgtcctttgtcccccaggtatctttcattgctgatttggttttgagcttgagggtcagtgtacaacaaggtggttacaatggtggctttgtctgtctctgatctcctttatctaggacagtgccactgctgtatccctggcaccctggtcctttgcaggccaggcaggccagcctgcaccaccgccccacactgttttatctgtttttctccttatgttgttcagatcggtctgttctctgaatgccctgtaaactagaagataggctaacaagctgatggggttcagggttgagatttttggcaaaaaacactcatgtgatgctaggtacctcatgtgactgtcacaaggcacaaccaggaatctctagttcccaatgccgaatttgaccttagactaaggtggctgccaccagagccacatcctcccctttgtagcttttttcatttttctttacattatttattgtgtttgagtttgtacatgtgtgtggtcacacatgccacagcacacatgtgggagtcagagggcaacttatgggagttggttctctcctcccatcccatgggtcctggggcttgaactcagcaagtaccttataagctatctcaatactgtttgcctccaaaatgtattactttgtgtagctgtcccttttctgttgctaataacagaatactacagacagtgtaagttacaaagaaaataggctcaattgtatccatcttttgctgcccatggcatgaaaacacttgcatcccaacacaggccagaggtcgctttagtgtgaagcaggattgagtgcatgtctgcatggctaagactctctacttctctggtttcctgatccctagggctctgggactctagatcctctggaccccttgataatagagggagcttcctgtttctcagaagtgccttttgaccatatatcccagaaactgattccatccatctctgccgtgtgtcactagtcactagatggcgtcactgtcatctctcactagtgtctgagatggccttgtcttctctcctgcccacagcctgctgtggaggtgccccagtacgtggggatccggctcatggtggagggctctaccatcaagaagcccatagcagcttgtcatcggcggacagcggtccgctcatcactccctcatctgctggcccagcaaggctgtggggaaggcaaggactcaggaccccctatccacaggtcagcttctaggaaagatgctggggccaggagcctgggacacactgagaagccagactctgcggccaccacctcagtccccggaaaggggaagaaaggcaaggcaaaaagtgccacagccctggtctgcatcaccctgcagaaatgggagtcccacaacaccagggtgggccccaccttcaacaggttaatgtgtctgaaacagcctgaggcctggggtagtaccatgtcccccaaaccccgcagtgttcccaaggccatttctgcctgctctccaagccctccccaagcatctgggcttgccctcctgccaaaaggccaccagtgatagcaagtatgaaccaaatatctttaaatacataaccaaatgagtattacaaagtagtcaccctgccaggcagttagaccaaaggctcggtcctagagtgcgcgcccagagtccagacccatgctgctgctctagccagcctttgccctcacctttctctggagaaaggtgctgccaccatgcccttccccattcctaaccagccccctcagccctcataacgccctagtgaggtaggtgctattgtccccattttccagccgaggtagcagcaagtttaaggacgttgcccgaggttgcacagctcagaaggggcagagctgggatgcagacccaggtctgttggtctcccaaccctgtgttcttcccactgcctctggaggaggagctgggaggggctccatctgcccttaccttgtatcccccacctttacacatgtactgtggaacaattggtcaggctggggcctcacccagatcctcacagcttcccttctcccacagccccgtcctacctccctagtctccattccaaggcctggctgccttcttcccatgtgctccgaccccagggccgggtcctcagactaccgaatggccaactggtgggctctaaggctctgtcaaccacaggcaaggccttgatgactctacctactgccaaggttctgatgtccttcccacctcaccctgatctcaagctggcacccagcatgctgaagccaggaaaggtgggcctcgagctgtgcctcacaccctggcgggtagtgctgagcagtgggatcggggctgaagggcacgaacagagggcagcgctcggaccatacagcgccccagggaagggcttgtcttctccagaaccctgttccaagacagaggcctgatcatatctctttccctcccctccttgcaccgaggctgctattcccctgcaccttcgaggcccccactttggaagtgcctcgaggcctctgccctttgaagttggacctcttcctagcacccacaggaaagtcacggccaaaggcaagttcaaggccatactctgcgacaaagccagggctgaggcataccccaagaagaggctgagcctccccaaacccttgacccttattctgacatgccggacactgagaaccatgggggataggaggctagagaaacccctgctctgatctctactgccccatcctggatccagcatcaaattaaaaaaagcaattaaagttctctggacttggcttgaataatgtgcggctaggctcataaaagagttgaccagcagggcctccatcagcaagggccacagtccccacccagcgacagacattggctttctctgcagggagacggatgggtggggaaagagccttcactatacagatgatgacactgagacatggcttgcctgagaccacagcaggcggaaagtcagccatcaggagtgccccttcccaaagacaagctgggctggcagaagagcttctgatggtcacagaacattatgacaagagacgggctttccctaaacctcagcctttctccggagagtatgtccctcagtgaggggtcggtcaagacacctcaaactgcaaaacccaagaaacaggtcaagtgtggcatttcctacctgtagagcctcagctgctggtcctccaaaagcggtatctagctgtagcgtgtgaatgcttcctgagtggggcagggtggagaggagagtgcggtgttgaaatccaatgacctgtgtctcccaaagtcagaagagctcatgcctgcacagtggtgtgtgtctgtcctcccaggacttgggaggcagaggcaggtgcatctctgaattccagtccagccagggatataccaagaggcccagcctcaaaagcaaacaaacctcctcgtgaccaggagtacagcagatgccacctccagacctggccactgttcacttgagcagagagcacagtccctggtcaacacttgctttctcagcagatcctcaaaagcagacttgtgaggtaggacttttattattttaagtccagagagcggtcacctgcccaacgccacacagtaagtgagtggtttaactgggatttatcttaggttggtaggactaaggagtcaaagaccttgaccgtactcagcaccaagcccactgtccttgagctgggtcacggcccttctttctattttccaattgggggttaagcactgtctatcggtgagagagccgcaggcactgcagggtccgagagaagtacgagggtaggggtgccacaagttcactaggggggtccctggatctggtgcctgggaggaggaggcggtgcaagtgcaggtgcaagggcatctgggccacctgggaaggacgcaggcgaaggcgtctgaggagagcttcgtccagcacctggagtgggaaagacagcagcccacctgagttccagccagaggagcccctggctctgatggacctctctggtctgcaactgccatcattttctcaacaggcaggcagggatttctctccacacagagctaagttacgtttcagctccttttgtgtttagtgaagccatgtgattaagccactcaccaatgggatgtgaggaaaacacagacctagccctcaaagccccgattcacaaaaacatccagtctccccttatggccaggaagcaatagcccttttctccaagtggctacccagagtcaggtccactcctactgtatgcccatttgccagacttaatccaagaagaaacaatggacttcagggcctgtcagaggtcagctccccactccttgagctaacagacagaaggaagcctgaggaagtcacagcaccacagaggcaagggtggccccagaggccaagcctgttcccccaattccctaaatacagagcaggcatgtgggcctgaagacctacctgtctctggagcttggtggtcttggctggccacagaaagcgctggcccagaacggtgcccactcgaggagcataggtgtggtccccaagcactgggcagagctgtagagccatgtgcacctgaagctgactggggaacactgaaagatggggggaggcagttgctcttcttgatcatcaaggactgtccccattcccagagcctgtgcatctatgaggtgacctctgcctccacagagggccatgagcagatcaggacaatgacagctggcaaccttcccagcctgggggcattgaacccaacagaactgaagctcctgggaataagtatgtgggttgggtgctaaactgtgggtgtgcacctaaaactctgcctcctgctgagcccactctcagagtccccagatgctcttttttttttgttttgttttttgttttttcaggcggggtttctctgtggctttggaggctgtcctggaactagctcttgtagaccaggctggtctcgaactcagagagaggtgcctgcctctgcctccccagtgctgggattaaaggcatgccccaccaccgcccggccaccagatgctctttggatgttgcaaaacaacatcttcctcataggcttcatttcccctgcagagtactgttcagccctacctgtcagtggctgcagctggaccagagcacagccacagcctgtggccatcacatggaaatggctgagggtcctcttgacaccttctaggatgtcctttcgagatggggatgtcacggggatggcctaggataccagtcaagaatgacttagcacacacgtaggagcccaattgagccacccctgctgccggctgacttaggacagggcctcagaacaggcagcagcaacttgcctgttagaggacaggggaatagccaccccatgcacatagtgcagactcctctgtaaggcaaaacctgaaaggactcctagtggcttctgactcacaagatcaatgccatccatgcgttccagcttcagggccacgtggatagtcccctcagaaggctcagggatgccatcagtgatgccactgagaaagagaaaggaagtctcagagcagccagctgggaccttccttggccctgggagtcaccccgcatctctcaccagtaggtggctgtgggcctctgtgttctccttgagtgaacgaagaacttctgcaagcggcttgctgtctgggggcagctggagagaagcacaagcccagacgcctccctgaaagaagaggacaagtcacataaagcctcttggttggaaaaaatgagggccagattggctgctcctgcagaggactagcactcggcacccacatagtgggtcccaactgtaattccacttccaagagagctgatgccctcttctggcctctggggcaccgggcatgcactgtggtacacagacacacatgcaggctggcctccgggggcacaaggcatgtgtggtgcacggacatacatgcaggctaaacacacatttaaaaacaaatctttggtcttttttaaaggagaccctcccaccaaggggctggagaaatgaatcagtggttaagagcactagctgctcttccagagtacctgggttcagcacccacatggcagctcacaactgtagctccagttccaggggatctgagaccctcacacagacacacatgcaggtaaaacaccaatgcactatatatatatatatatatagatagatagatagatagatagatagagagagagagagagagaccaccttcccacctccccaaatgaacaccaggactacagtccagacctaagaaacaaatcctggccaggcagtggtggtgcacgcctttaatcccagcacttgggaggcagaggcaggcgcatctctgtgagttcgagaccaacttggtctacaagagctagttccagggcagcctccaaagctacagagaaaccctgtctcaaaaaaaaaaaaaaaaaaaaaaaaaaaaaaaaaaaaaaaaaaaaaaggggggggaaataaacaaatcccaagaccttttttctggcccccagagaactcagacaaatgccctaagagttactacacatgccaggcacctgaataggactcttatatacagtgggtgtaaaataaaggcccaccacactcctcacttactttccaggtgctcgcacaacctggagctcccggtgtttgagccccagggcctggctcagctgtggcagcacagaaagcaaggtcagctccccaggtctccctgagaagtaagagggagaaaacaagttgccagagcaccatccaacgaactcctccccaccagcctttccctccttgtccctgcccatacctgtcacaggcagaccctgtggcttgttcagtgtcaccagaggtcctgaaatattcggtagatgtcagcaaaagcagggcagcctgtgtgcatgcagcctctggttataagctcccaagcccactccaaactgaacttcctgctccccgcacccagggcctttgcacctgctgccctgagctttcattaatattgggtcccttatcacacacctccctataatgtgtgcccctcctacagtccttgactgtttggtctgagaccagctcaaacaggccggcctcaaactcaactataggtaagtctggtcttgaactcttgatcctccttgcctctgtctcccaagttctgggattacaggtgtggtcaccactcccagaaacagcagagattcactattcctcacatcagaacgcttgctctctcaaggcaggagccagccatatttatcccagtactgtgtagcctcctcattgctacaatgcactgaagttcagcaaagttgtcattcctaaaggcacacagcatgctgcttacagaccccaggaaactaacttctgctcccgagggtcttagaatgcgaggcggtgtgaaggtttcctatgcctggcggagggaatgtgacggctacaggggtccgactccagggggtcggaggctccctcaccttgctgatccaccacagctgccctcagcacctcagccagctcctccgggccgaggttctctgttcgcagaagcccggggaagggctggtcctccactgcgtccttgcacttgctggaaccttgaggttgaggccgacccctgagaaaaacgacagaagccggtacctccaacgcccacgctgcccagtgcagccttttcgtacacaaccctcagaacccccggctcggctgacagttgtggtccacaggcccccaagactacagaaggggcatcagacgctcggagcgccaaccatctcgtgtcgggtcacacaacgcggctgggattagaacccatgtcctgatctgagtgcccgacctgccctccccttgtcctagcctccctcctacacggaagtgttgagttataatcaccgggcctcggtgccgaagcctgcatctctcggccgtgcgccagccgccagccggggccgccaggtgccagacacacaacgccaaacgcggaagacgcccatcgccgcagcaagcacagacgcatgcgtgtccacggactgccccaccgcgtgcatcctccgtgcgccgattggtcagcctggctgtcaatcagagcatcgagcaggcggagcttcgaggacggaagagccaaactttcctttggctgaggaaggtaaagtacggtctccggctctgctttgggggaaactgaggcaggaggcgcggttatttactcgcggtagaggacgtgtcttagaatagaaagaggcgagtttgcagatagattgtttcagttctcaggacccttaatctgaaacccatccttgtaaagcagagggagaaggtgaagccccacagccttcgggccagggcacctgcatggaaatggtctgcgacattaaccatcccatgactgtggctcaggtggtagagagatttttctaggatgcacgagttcctgggttcgatccccagcaccacacgaagaccaagatcacagatacagactgagttggagaccagcctgggatatgtaaggcccttctatcacaagaaaaacaaactaggccgggtgtggtggtgctcttcttcaacagaggccaacctggtctagacagtgagtttcaggacagccggagctacacagagaaaccctgtcccccccccccaaaaaaaaaagaaaagaaaaacaagcttggtgcggtccacatagtaagttccacactggccagtatgttgttaattccaaagatggaatgagtgtaaggaaaaaggccagccaaagaaacacactttggctctgcaaccagaaccaaagaaatgcacccttgtcagaagccagccttggtgacgcccccccccccaatgcctagctagccgccagctagcctagcatcccacccctcaggttccaggacctggcctgagaagcaactaacaccttcccccatttccttagttagtgcttgagataaacataggagattccagatacctggcctgagaagcaactaacacctattctttctccacacaggagattccggatacctgcctgagagcaattaacattcattcctcccccacctcctttttctctgcttcctcctttctctataaaaaccccttgtaataatcaataaatgggccttgacaagaaaacctgcttggtcccgctctttctttcccgcccatcattttcaggcgtgatccacctcggactcaggaattaccggagccccgagggccggggtacaccctgaccctgaaaccagtgccagagaaacacactttggccctggaatcagagccagtgaaagaaatacaccctggctctaaaatcacagtcaaaaggctaaaaaggaccagtgaaaggaacacactttggccctgaaaccagagccaaatctaaccctaaacctgtgcagaaaaccaaccaatccctgagcaggagatctagccattctgagctcagggattgaaatctgaccaatccccaccctggaaatctccctgggaaaactctgcccccccctaagaatccctatataaaccctgtgcctgttcagcttcaggctgcctggctgccctctgccactggattcttgaatgaggtttgggtaagaactttcgccggagcagagaccaccctacacactggctctccaggggactggagttgaactgttacaatttaaccagggaaaccctctcctccccaagcagagctgatacactgaggaaggcctttccctgaagcagggctgtaagccgctatgcttactgtgacctgtggcattccttggctcctaaacgccagaatacctttccatcccagctgtaacactcagtattctgtgactccggagtgccagaatactttgcatctgagccataacacagtattctttggctcccgagtaccagaatccattccttcccatccaatccgttgaaatgcttacaatgagaaaaaccacgaacccaaatcattgagaccaaattaattaaagtttttttttcattcatgtacgagactgcctcccccaaggcctgatttgagaggtcagcattggatgtgaggaagacaagggggttttgttgttttggttttttgagacagggtttctctgtgtagctttggagcctgtcctggaacttgccctgtagattaggttggcctagaactctcagagatctgcctgcctctgccacttgagtgctaggattaaaggcatgtgccaccaccgcctggcctcacctggatcacacagacacatatatacataattaataaaatacagacctggcctttaatcccagcactaatctacatagtgagttgcaggacaaccagagttacatgaccctgtctcaaaaaaaaaaaaaaaaaaaaaaaaaaacaacctaaataaataaaatgcagaaagtaacaatatgtacataataaaaataatgaaataataacataattgaggaacagtggggcatggtggcatgtgcctttaatcccatcacttactgatctacatcccaagcctgaaggaccttgctgaaagggctccagcactagactgttgcttctggcagagaaagtggctctcaacctgctggtcaacgacccctttgggggtagaagggccctttcacaggggtagcctaagaccatcagaaaatacagatattcacattacaattcataacagtagcaaaattacagttataaggtagcaacaaaaataattctatggttaggagtgggtctccataacatgaggaactgtattaaaggttgcagcattaggaaggttgagaaccaccaatttaggggcagatgctgcctccttcacagcactcagccacagttgtgttgtgtccttgttgaggttctatccggtcctccaaagttcagctgtgggaaactaaatctttaacttcataataatggtaattggaggctggagtaattagtaccagataaaatcatgaagagtgtgcttccatgatggccattaacagctttctaaggagagcagagaaaaaaaccttttcctcgttgtggaatgacttcctccgtgttggtgtgcaccagaaaggccccctgcttgtgctaagtggagctatgccatgctcttggactctgcagcctctagaaccatgatccagatcaactgtgtgtctgtgtgatttgttttatttttattatgtgtgcatgcctgtgtgtctgcgtaagtgtataccatatgtgttgcaggtgcacggagaggccataaaaggggcatcagatcctccgaagctagagttttaggcagtcgagagcctccacgtgggtgctgggaactgaactcagagcctctgcaagctcagccagtgctcagccagtgctcctcagtttgtgtgcttgttttcagtactgcagatggatccaggaccccacacgtgccaggcaagcattctctcactgagctgcaccctcagactggtctcaggtggtttgttatagcaacagaaaacagacatgtggaaggagtgatggcgtatcttgactgagaggaggaataacttggctactcgcacagcacatgtctgggcaggttcacaaggaggcttccagggacaattggcacctaagaaccctgacctaatgaatggatgaaccattcagaatttggatgggttcttgggggggggtgagggaactgtggtgggtggggactgcttggaggaagtagggtgtttgttgtgggtggctctcggaggctatgtcttacattggctcctttctgttttggttctttcaatttcctgttgtgtgctattctgctacaaccgcctcacccagtagattgcagcctctgttaatcaagacagggtcttactgtgtagccctggctggcctggaactcatagagatctgtttcttctgcctcttgagtgctggaattaaagacgtgtgccaccaccaccacctgacctagaggacaactttattttttttaattttttatttattatgtacacattgttcctgcctgcgcaccagaagagggcaccagatctcattatacatggctgtgagccaccatgtgggtgctggtacttgaactcaggacctctggaagagcagccggtgctcttaacctctgagccatctctccagccccctggatgattaattgtagaagtttcagttctttctttttgtttttgttttttgagacagagtcacactacgtatcttcaactgatctggaacatgctacgtagacaaggctggcttcaaatgtgtgtcaatgttcctgcctctgcttccagagtgctgggattataggcatgtccctaaatctgttatttttttaaacacttatttttgagggggagtcggtggtggtgctgttgtacgtacatatgtagagatcaaagggcatcttgtgggagtctgttctctccttccaccaatgggttctagggactgaattcaggttctggagcttgacagcaagcaccttaatctgctacaacatcttgttggtactaaatccatggagaattgaaaggattgtttattgttgggcccgggaatatagctctgtggtagtagaatgcttgcctaatatgtgtgagattcttaaaaaatcattgattgttttcttaaaccaactttttaatttgttaaaaccaacttttaaaggatatatctaggcatggtggcacacagcattaaccctagcacttgagagatagaggcaggcagatctcctatgaatttgaggccatcctattctacgagttccagtacagccaggactacaggactgtgtgatatgcacaacacaggaaggactgatgacaaatttggtaaaaaaaagaaagaaaaacagcaagtggtttcacattgtccggcttcacctggagtgggtgactgtgggtactcctgaagcctcccaggagtgggtgactattctgtcagactgtgggtattcccgaagcctcctaggaggcctcctgtgcatcacagaagtggcttgagcaagaacttgggacagactgggcaagtgcacagctataatcccagcactgcagaggtgagggctgatgggtcaggagctcacagttatccttgactacaggaagtctgaggccagtctgagctatgtgagactctaaaacatacatgagtcagtgagttggctcagccagtaagggtgcttgataccaagtctgaccacctgagtctgatccccagaatccacatggtaggagcagagaaccaactcccaggagctgtcctttgacctctggacttatgctattgcatatgcataccaatacataactccctaaaatacaaaatacatatgtttgggctttttgtttgttttgttttgttttttcgagacaggtttctctgtgtagctttggagcctatcctggcactcgctctggacaccaggctggcctccaactcacagagatctgcctgcctctgcctcccgagtgctgggattaaaggcgtgtgccaccaacgcccgactgatgtttgggcttttttgatggtttttatgtgtgtgtgtgtgtgtgtgtgtgtgtgtgtgtgtaattagaaggagaaagagagagagggagagagagacagagagacagagacagagacagagacagagacagagacagagagaggagagagagccaaagtctggtttgtggcccattcaactaagcagacttctcctccaccaatggtgtccaccaatggcccaggaaaggccatttccccacttgaaccagcgcctggccctctggagggttagttcctttactctttggaggtctccctccctgccccatagcaggctgccctctcttgctcccttcccacaggcagctaccttcatcccagtgggctatgagctcctggaagaaaaggaggagccaaattttgcctaggctgagggctcagtgccaggtggcagccacagtcaactgctgaacttgtgaaactggaccccaggagaagaagcctgggacaaacatcagcttgcatcagctccctctggctcagttacagctttgcagcaggtgtggacaggctggtgcttcagcaatgggaaacaggactgatgcaaaccaggcctccaggaggccaagccctggagccagcctgcagtgaaccagcctccagccacatctacaactgtgtgagggcctagaatagaaagtgtacttgacctgtctgtccttgagtgctcttctcttctcacacttggctccaggcatggggcagcttccagcgatggctttccagacaagcttgagtaacttggccctttgtcttagtgttttctaaatccaaataggctttacagggaggattgtgaaattatgttagctttggatctgagagccagactgaaacctggcttcctacaggcctagtctttcctgcttaggtcagttacctgtcactaataaatgggggctccttttcctaccagccaccaagatggctgaagtggaggagaagaaatgaaccttccacaaattcacatactacaatgtggacctggatcagctgttgacaggttctaggaactgctgatgcagttgtacagcaccccagaggtggtgtctgaaccacggcctgtggcagaagcagtactcgctactcaaacacctgagaaagctcaagaaggaggcaccaaccatggagtaacccgaggtgctgaagacccacctgagggacacgatcatcctgcctgagatggtgtgtgtgtacaatggcaaaaccttcagccaggtggaaatcaaaccagagctgatcaactgctacctaggcgagctcttcatcacctccaagcccatgaagcatggccagcctggtattggtgccacccactcctccagctgcatccccctcaagtagctgtggccaacaaagactcatgtttaaaaagaaaattggaagccaggcattggtggcacacgcctttaatcccagcactcgggagacagaggcaggtggatctctgtgagttggaggccagcctggtctccagagcgagtgccaggataggctccaaagctacacagagaaaccctgtctcgaaaaaccaaaaataaataaataaataaataaataaaataaagaaaagaaaagaaaagaaaaatgggggctcactctgagaagacctgactcctcctcctcctcagaactctctggtttgtttttgcagtgctggggtcactgtgccaggctagagactcactgcaatctgagggtggaagtgctgagcaggaacagggaactgtgtataagctggcataggcattgataaattcccctgtagatggaccaggacctttcaacccgaacacatggaaagttattgtaaaatacaacagttgggaatcaaaagagtggtttgatccaccttacaggcaaatttcattcggaaactgacaacacatatggatcatgtggtctgcctgaatatcaaatatggcaggcctcaaaaatcaactgcagattttaatataacatttaattattcatctattaattaatttattctgtctcataatatcaaaccttatctattaaaagggagcagggctggggatgtggctcagttggtagagaatttgcctagcatgctggaaaccctgggttccgggttcaatccccagagccacataaattggatgtggtgtttcacatctgtaatgctagcacttaggaagtggaaacaaatggatcataagttcaaggtcatcctccactacataataaatttggagccagcctaggcttctgtatctagaagaaaaaacagggcaccactgatgcaactcattgcataaaagcaattgctgtgtgagcctgacaatccaagctcaatccttagaaccaagagtggaatgaaagttgtcttctgggccatgcacgcctttgatcccagcactcgggaggcagaggcaagtggatctctgtgagttcgaggccagcctggtctacagagtgagttccaggataggctccaaagctacacagagaaaccctgtctcaaaaaaaaaaaaaaaaaaaaccaacaaaaaaaagaaggttgtcctctgacctccacacctgcaccatagtactggcataccaacacacacacacacacacacacacacacacacaccagtaatgacaaatgctatctcctgtaattctcggcaaatagtttcaaacaaagaacacaggcaaagatgaggtattggcataaataatttacttcaggctctaataccatacattagtggggaatgagaacaaaaggaggaattgtctgacttcccctggggatcacaaactctatccattcggcccagcaagggcgccaatgaaaggtgaagaagccacgattccatccaagtccagcttggtgaaccggtgagtttactaggttacttacaggtggggcctgggtgactcaaaatcacaggtgactccctccaaatctgcatcagtgacatcctggctttagttaaccttttacctcttatatactctagcaccgccccaagatcatgagcagctggggcggggcaggagggaggaatggctgggatttcaggtgctaagaccccctgacactctcctccctttctaatacaggtgttaactatttccataccctagccataggcctcaccgtcactgtggcatttggttcattttgttgtcttgattcaggtcaaagtattctggaggccaccatagcaatgtctgttgcttgatgagcatggtcaaggcaggaggggactgcagagagggagtggcacatagggatggcatgtgaagaccgagtggcagacttggtgccaaagcctgccagggacaagtgtttgtcccctaaactacctgtgacatgaaggaaggaactgagccaggctaggaagttctcccgtgaccagcccaccccagagctccagcccttcctgcagtttccttggtgctgtgctgtgagaggggtgcaggttggtgagaagctctccagctgccaggcttgtgggtgcttctagcagagtgcaaggtctccagtcacatccttggctggggacggcatctgaggacttgggccttcattgcagcatcttcagacaggcggggaggagggaggaggtcttggccttggacggctgttcttcctcagtggcatccaggaactgctgcatataactggaggagccaagcagcatgtggcctgtggcctgcatgctgaagagggcccagcggagcatttccctgggagacagcaaggcactcaggttaaacactccccatgctatctccccaaatgtcttctccatttttctatgctggcctaaagcagttggcttcaagttagacttctttctttgtttctacttcttttatttttgagatagaatcttaacactttatctcaggttagctagaaattcatttatgtagctcagtctggctttgaactcacagaaatctcctgcctcaatctcctgatgctgttgcagttatgggccaccacacctaactttttttggtttggtttggttttgatttggctctttttgaaacagaatctggagatcctcctgtcttgtcctcccaagtgctaggtatacagacatgtcccaccatactgggctcaagctagcttttctccttaggaagatttaagtgtcactaaagtaaaatgacaaaaatgcttccaagtacagacaggaactgggaaccaggctcatagctagccatcccttacacatagttctgcctctactcttgtgacaacttttctggaaccccttgctttttcccatgcttaacttgagttctcaaaacaaagctttttattttcttgtaatgatattttgtttctttcttttctcttctatggtgctggggatggaacccagggctttatttgtgcataagcagctgacctgccatggagctatgtccccagccccatatattttttttttcaagacagggtttctctgtgtagctttggagcctatcctggcactcactctggagactaggctggcctcaaactcacagagatccgcctgcctctgcctcccgagtgctgggattaaaggcgtgtgccaccaacgctcggcatccagccccatattttttaaactactctggaccagccagattaatttacataacacatgtctaccctttgtaacactgcttcttagactttatagtcttcccaggccagttctcagaatgctggccacaaggctcccatgcctgatatcatattctaagcatagaacttggaccagacagggctgaacactgatccagagtggtttgtttatatctaaaatatttaaaatatattttaaaatattataaagatgggtgatgtaactaatttagtgcttgcctttcatgaacaaagccctgggtttgatccccagcaccgcaataacccagagtggtaatataggactgtaaacctaggatccagcactgtggaggtagaagcaggtggatcccaagttcaaagtcatccttggctacatagcaagtgtgagaccagcctgagatacatgagaccctgccaaaaaaaaaaaaaaaaagctttaactgttctggttctgagctccagcagccagaagctttgtgacttgtaaaatgggtaatgagtttgaaactaatgtgaagcacttagcatttggtctgatggacagaaaatgggacatgcagccaagagcagctggctgaatgcaacttctcccacagctattgacaagggctcggcaggggtcactaggagttgctggtcttaagaacaataaggaagagaaaacacaagaaagagaaatactgccaggccgcggtggcacatgcctttaatcccagcactcaggaagtagagacaggcaaatctctgtgagttcgaggccagcctagtcttcagagcaagttccaggacagctacggttacatagtgataccctgtctcaaaaaagcatatatatatatatatatatatatatatatatatatatattgaatttagtggcctgaggcaatggctcagtgggtaaagtgcttgccatatggccatgaggccctgaaagcccatgtaaaactggggatggctgcctgtatctgtgaccccagtactcctctcatggtgagacagagagacaagagactcctctgaagctttcaggccagcaagcctggcccagacaacagacaaacagcaaagaccctgcttgaaacacagtggaagatgagaccagcaccttaggctgtcctctgacttcgaaatgcacgctgtggtacatgggtgcccacattcacacacatatagagataaagactggctgggcagtggtgacacacgcctttaatgccagcacccttgaggcagaggcagttagatctctgagtccaaggccagcctggtctacagagtgagtttcaagacagccagggcaacacagagaaataagaaaagagaaaaaaaaaagatataaagactgaaactgaaaatataatatattagggctagaagtatagcttaatggcatggtgcttgtctagcatgtatgaaggtcctggtttaatccccagctttgaagcatgtgtgtgtgtttgtttctttttgtggtactggggaactggacacaaggccttaggcaagtgctctgccattgaactacagcctcagctttcttttcttttttaaaaatgtttatttattttatgtatatgagtactctatctgcatgtatgactttatgctagaagagggcgtgagatcccactatagatggttgtgagctaccatgtgggtgctgggaattgaactcaggacctcaggaacagcagccagtgctcttaaccgttgagccatctctccagccccctcagctttctttttacccccccacacacaatatctctctaagttgcccagtttagccttgaacttactctgtagcctaggcaagcttctaatttgccatcctcctgtctcaatttcctaggcacctgggagtacaaggccatgtatagctttatatatatgtttcgtgcagtgccttcaaagttatttctcaaattagagaactgagttttgactctagccagccagtcttaaaaaggaatgaaaataaggcctattctacaaatgaatgaaccttgaaaacagaattcttgtggggaaagaatcatgatcccatttctatgaggtctctaggatagatcaatggagcaacagaaagtagagtaaaggtgagcagggtctcgggagagggctgagaaccattatttactgagtacagcttctgctgcctggtgcaaaggttctggaaaccaaggcaatgcttgcacaacatgattagttacttcatgctagacacttcaagcggccacagttgaaaaatgttgaatgtgcagattttagcacgggtgttttttcttgaaggtctcattgtgtagctctagctagaatttggaacttgaaatgtagaccaggctagcctaaaattctcaggagatctacctgcctctgcctcctgaatgctggctgggattaagggagtgagctaccacacctgaccccttagtacatttttttttttaaatcacagtaacaccactaagtcactcagctaaccacagtttgacatcagtttttattttctctaagtttttatttttgttgttgttttattttgtttttcaagacagggtttctctgtgtaacagccctagctaccctggaacttggtctgtaaaccagactggccttgaactcacagagactcacctgcctcagcctcccgagtgctgggaccaaagatatgactcctggcctttttattttctttccatgtgtgggaggtaggggttatgcacctgagtgcagtgcccacagtggtcagaagagggcaacatatctcctagagttgcagttacatgtggttgtgagctggctgaggttggtgccgggaactggacctaggtcctcgggctgagtggttccctttttctgtttttgttttcaatacagggtctgatctggcccaggctgtccttgaactcctgattctacacctccaaagtactggaattatagttacattttcacttacaaaaatattagctgtggaaatagctcaggatatgagtatgtgcttagcatgcgtgctgccctgggtcctatccccagcacacaaaagaaagcacatgactgtcattctttgttagcccccagtgccaacccaggctttgagagagttcagctttgggtagacacaaaggacctctggttagctagtctcccaccctgctgtcccaatctactcacttcacgacgcgcttggcccggtagcagtgcaggtcataggaaagtgtgtatgtgtcatagagggtcgccttcacgttcaggcagccgatgaagtcctgggggttcagcttgtataggtcaaaggttacccgggccacatcaatcttctttgttggcttctgggaaagggatagctgtggtctcgtcttgcgctgcaagacaagtccatgttagctcgcctctgggactccttccacgccctcgacactcacccctgctggaggagactgtcacctgttctgatgggggcttccacttctgccccttctgcaggaccatgaacacagtatctcttgccagggcttggaagtattcttctgtctcaacaatcgtgccgtcttcctccagcacgagggagaagggcttgtctttaagtttcaagatatcctgggcctggaaaagaaggttggtgacatttctgccatccctatggagccacagagttgaggagcaaaggcccgcagtaaagcacttcagctgccagagagagagcaagtgagctgccatccatccgtgcgatggactgactgtcactgtgggggcccactcaagggctgtgtctcagtacttcctactcccaagaaggagtgtagtctaatagaatgggagtcatatgtgaggtcttttttattgagaaataaattacataccatgctgggcaatattaggagtcatatcgaaggccttgggcaagctaggcaaactgcagcattgaactatatccccagccttctttgtactttttgtttggagacaggatcttactaagttgtttaggttggcctggaactcactgtgtagtataggtaggcctcagccttctatttagatcttcttgactcagcctcctaagtaacttggattacaggcctacactaccaggcccagctaaactttattttgttggtggtggttttttgtttcttttgctatgtagccgtggctggccttgaactcacagagatccacctgcctctgtctcccaagtgctggggttaaaggcacgttgttatggaataatcttttggtacactgtgaagttgtgtctttgtcaaggcgctttctgactggtttaataaaagaactgactggccagtagctaggcaggaggtataggcaggaaagcaagacacagaggactctgtgaagaagggcagagtcttgggagtcatgagcaaatgcagagggaagcaagatgaaagaaggtaccactatgatgcagagggtagatagtaaaaggattaatttaagtcatatgagctagctaaacacaactctaagctatcagccaagcatttataactaataatgagtctttgtgtagttatttgagaactggctatcgggatagaaaagtctgtctatagtgtgcatcaccatacctggccactattttaaatttttatttttaattatgcgtatatgtatgtatgtgggtcccctggagcaagtgattgtgagctgcccagtgtgagagctgggaactgaacctctgtcctctgaaagtgcttttaacgactgagccaccactctagccccaacaactcatttgtaatcttgttcctgccaaagctacatggcatgaactgaagaaacaggtcattcaaaactgagggacaggaaataaaataactggcttgccatctttaaaagccagctagaagaatcagcaggtaagggtacttgcagtgcaaactttagcatttgagttcaatacctggagcccacagtagaaggagagaaatgactcccaaatgttgccctgtgacctccatgtgtaccctgtggcatgggcatgccagtgctcacacacacgcttcatagacttacagtaataattttaaatataaaataaaactgtctggatttgcaggacaatcagcagtgctccaacagagtctcaagataagcttgggggggttcttgttatgtagccctagttgggcaggaacccctatatagagaccaggctgacctcaaacatgtggtcctcttgcttcttcatgcatcaccacactcagccttagttttaatttcttttgaggcatacccagcgtatcctggaactcaattatgtagcccaggctagcctcaaacctgagatcttccatatctggtctcccagatacgagccaccatgcctggctcatttctccacgtgtaaatatggggaaggggaatgaatggccctttcagcaagaaaataaccacccacccacggttggtgtgaaagacggtagtgcactgccctccttctgtcacttgaccatgtcacttatcacacacacagctctccaggcggaaatgccaaccctccagtgccaacacctttctccgcttaagaccatgccactcatgcgcacagacttcagggctctccagaaaccgaagcagccggcaggctcaactctcagccaaggcctggagagagcctatgcagggtaccggcagatcccttaccttgcccaggaggtcctccaggctgtgagccatgatgcctttgcgaaccttccgatctgccgtgctaactcgacagggcctcgccctggggacttcccggctgggcttagacaccagctgttgggtcaccactgcagtgctcactgctacatgcctggggacaacagtttgtacagcagatgacctgcctgcggctaccaggtctgcccatgcctgcctgcttgctgagttcaggtgtgacctttccttccaaccaatcatggctgcttcaggcggctttcacaaagtccatcagaagacacagctccgatttggaggggcagggaaatcagcgggaatcttgcttaaatcagactcacttcagtgcctctgagtggagcccaaggactgctaacaagtccccaagctgtgtcagtgtggctggttcttggaccagccacattctcctgtggatggcttctgcttttgtggccttgttcaccttgcctaagaggcagggtgaaatggagctggtgtgtgtatatatgtggggtgtgtgtgtgtgtgtgtgtgtgtgtgtgtgtgtgtgtgtgtgtgtgtgtgtgtgtaaatcggcctgtagaatatgtggggactctgaggtacacagggtagaaagaaaggagcagagagaatttgggtcttggctggaattccaagtttctctctgttacggatttgctaggtgacagcatacccagcctgtgactcagtttcctcatctgttgacttggcatagttgccaccacttcccagagaggagtgaggctcctgggagatcaggaacaaaggcacctggtgcccagcctgaccctttctactccagatgtgatgggaactgtggcagtgacagagagtaagatggggactgtctagactgcaagatcttgggtgctaccctaggcctcctgaatcagatctgtgggggtttattgtaagattttgtctgttttgttttaatgggggtcttgcttatttgtttgttttttgggatagcatctccatatatagccctggtttactggaactaatttcctcatctctgtctctgtctctgtgtctgtgtctgtctctctctctctctctggacctggacctatgcagaccagactcaaactcaccaagatcctcatgccactgctccccaagagccaggattcaaaacatatgccaccatgcctggccatatcagctagaccccacatgactttttttgtcttttaaaatgggatgcctatgtagccctgactgacctgggacttgctgtgcccactacaggctggcctcaaactcagatctgcctgcgtctgcctcctgagtgctgggattgaaagcgtgtaccatcacatccagcccctacatggtttttatacctattaaagttttcaaagttctaatagatggctccccagctttccccttccttcccatacccagctctccttacctggacagtgacttagggtacaggaggctgagagacttcatggcatagtccatccttgtcagctggattgtgttggacctggatcggaggcagtaacctatctggttagagtgggaagggagggaggggtccctctctttctttctttgactcagtggatcccagcccccacacggcaaccctctgccccagtctctcctcctacccccaatttccctgaatccacaccaactacactgagtcagcgtctaccatccccacccattccacagccccagaacaactcactccatgtttctctgccccaagctctggttacactgagctgaggaacccaagtcaaggctgaagaggccctcactgatttgtccctgtccctgggggcagagtccacattatgctggcaggaggtgagtcataccacctcatgctgtgagagacttgaaagtcacctattgtccagaaactccacaggcagtcagaccttggagagcctgctctaaccatgggcccttgagcaataaagtcctcctgaggcttagaactggctaagagaactttctgtgatcttaaagactgtctaggcttgtgttcaccaataccttagctgttaccactgagcccttggcaccataactaatgtgacaaaggagctgacaccgaacttctattgaggcttaactaatttagttaggtaactactgtggtttgtgacgccaggtaccccactggacattacagttgtagtggagtaatcctgggctcatgtgccccctgcctttcctcctatattgctgttctctggttcttgcctgctgagctgcaagtctctgcacaggcagtctcttctacctgcaatgcttgtctcaaactcagagctcaacataagtcacctagaagccccagctcctggctgccaactcaggaaagccttttctggtgccctcttgcctggtaccagattgatccctgtgccctgcccttccatgtgaaagacccctctcccttagccctttctttctcaagtttgtctcctcttcctcctgtcggcggcttccccgatccccacccccggtggcctttccccgcccggcccgagaacaagcaccgggtggggccggcccgagaacaagcaccgggtggggccggcccgagaatgagcaccaggtgggccagcccgagaacgagcaccgggtgggctggcacgagggcgagcaccaggtgggtcagcacgaggacaaacaccgagtgagccggcctggagctctgcccctgagcccccgccccgcccgaagagaaacactccgtcccaaggtctccgcccccaaggtcagccatcaggaaaagggggggaattgagtctgctgtaccagacaccagaccttgagaatatgctgatctggaatggctctgtgtctcatttgaaccatccaatggaaatgattctgtatttcgcctcatttgaaagactctgtgtttcacctcatttgaataactctgtactttgcctcatttgaataaccctgtatagcgcctcatatacattgaccaatgggaatagctctgtataatgcctcattagaattatccaatagaatccttgctcctagcttgcgccttttttcctatataaggaccccttttcccttggctcggggcgcttagccacacagaagctaagtcgccccaggtacctgcgtctccaataaagcctcttgtttttacatccagttcgtggcctcgctgattcctgggtgtgtgggtctccctctacgaaagtgcctcttcggggtctttcatttgggggctcgtccgggattgagacccgcccagggaccaccgacccacgtctgggaggtaagtgttgtgcggatccgctgttttgtcttgtctggtctgagtctgtcttgtgaattgcgcttgcgtttgtagtatacagctgtgtacatttgtaggcggatccgaggagggactgacgggtccgaactcccgaccgcggctccaggagacgtcctggtagcgtttgaagccctcaggaagagggatttgtattttgaacttgggaagccctcagggtgagagatttgtactttgaacttagatctatgactggacattttcccagtctctttggagaaggccctcggcttgagggatttgcaatctttactggggacgaggaaggagggcccccttcctcgactctctctcaattccttctgtcgactctctgtcgaaaccgcgctgcgaaagtctgttctgtgttattcggtctttgtcttgtagctgtcatttgtgccctcctaagcctagaaactatggggcaaactgtcaccactcctttgtccctaacactctcccactggaaagatgtacaggaatatgctcataaccaatctgttaatgtgcgtaaacgcaaatggattactctttgttcttcagaatggccgacctttgatgtaggctggccgcgagatggtacctttaacccccagactatattccagataaaagagaagattatggatcctggaccacacgggcatcccgatcaagtggcttatatcgtcacttgggaggctttggttcaggacccccctccctgggtacgtcctttcttacatcccaagggcccctctctccttcccccctctaaccgctccaaccgacccattccttcggcccctacacctcccactcctttgattcctcccaaccccccttcccattccaacctttaccctaccgtgatgaaagacactaaggctaaagaaaagaagacacctaaggtactccctccgggagaagaccagttggttgatctattaacggaggagcccccgccatatccgccactgccgcccccaccagaggcagaagcggactccgccgctgccttggcggaagcggcccctgacccttcaccaatggcttatcgactaagaggtcgtagggagcagcccgttccagattcaaccactctgcccctccgaactgggctgaacggccaacctcagtattggccattctcagcatcggacctctataactggaaaaataataatccttctttttctgcagaccccgtgaggctgacatctctcatagagtcggtactcacgactcaccaacccacctgggatgattgtcagcagcttttgcaggtccttttaacctcggaagagaaacagcgcgtgctactagaagcacgaaaaaatgtcccaggagtaaacgggcagcccacccagctacccaatgaaattgatgcggcttgccctcttgaaagacctgaatgggattttaccaccgaagcaggtaggacccacctgcgtctctatcgccagttgctggtagcgggactccggggggcaggacgcagacccactaatttggcccaggtgaagcagataatacagggtgcggaggaatcacctgccgcttttctagagagattgaaagaagcgtacaggatgtatactccctataatccggaagatccaggtcaggccaccaacgtttctatgtcctttatttggcaatcagccccggacataagaaacaagcttcaaaggctagaaaatctacagggatatacactccaagatttgttgaaggaagcagaacgtatttttaataagagggaaacacagacagaaagagaagaacgttggaggaaggaaactcaggagagagaggaaagactaagacaggaagctgaggaaaaagaggttgcgagagaccgtaagcggaataaagaaatgagcaggttattggccacagtagtgacaggccagagacagaatagacagagggatgacagaagggggccccacctggacagggaccaatgtgcttactgtaaagaaaaaggacattgggcaagagaatgccctaagaacccccgggccaagcttccaccgccaagggtttctgacctcctgaacctagaagattagaggagtcggggccaggagcccccccctgagcccaggataacactgcaagtcggggggcatccggtcaccttcctagtcgatacaggggcacaacattccgttctgaatcggtcacccggacccctgagtcacaggactgcatgggtacagggagctacaggcggaaagcagtaccattggactacaaatcggcagctccagctcgcgaccgataaggttatgcattctttcctccatgtgccagactgcccctaccccttactaggacgggacctattgaccaaattaaaagctcaaatacactttgagaggtcagaagtcaaagtcacagggccagagggaattccccttaccatcttgacaatgtccatagaagatgaatatagactccatgaaaagaggactaattcgaacaatcaggaaacccttgatcactggcttgcggaatttccccaagcctgggctgaaacaggaggaatgggccttgccattaaccaggccccaattatagtaaccttaaaagctgccatccttcctgcatccgtcagacagtatccaatgcctaaagaagcccgcgaaggaattcggccacatattaaaaggttacttgaacaagggattctggtgccctgtaaatctccttggaatacacccttgctacccgttaggaagccgggaactaatgactaccggccagtacaggacctgagagaagtcaataaaaggatagaggacatacaccctactgtccccaacccttacaatttgctgagtggattgccacctaactatacctggtacacagtcttagatcttaaagacgctttcttctgcctccgcctgcatcccaccagccagcctatatttgcctttgaatggcaggacgcggcccttggaatctctgggcagctgacttggactaggctacctcaagggtttaagaacagccctaccctttttgatgaagctttacatcaggacctggcagaattccgggttaggtaccccgctctaatcctcttacaatatgtagatgacattctcctggcagccaaaaccaaagggaaatgcaaggaaggcactcaagccctcctccagactcttgggagcctagggtaccgggcatccgccaagaaggcccagatatgtcagaaacaggtgacctatttaggatacaagataaaggatggacgtcgatggctaacggaagcccgtatgcgagccatcttagacattcccaccccacaaaatccccgccaactgagagaattcttgggaacggcaggcttctgccgcctatggatccctgggtttgccgaaatggcggctcccctctaccccctcactcggccaggggttgcttttaaatgggaagagccccaaaagaaagccttcaccgacatcaaaaaggctctccttgaatcaccagccctgggtctaccggacttagctaagccatttgaactttttatagatgagaaggagggctatgctaagggagtcctcacccaaaatctggggccttggagaaggcccactgcatacctctccaagaaattggatcctgtggcatcgggatggccaccctgccttcgaatgattgctgctatagccctgctggtaaaagattctcacaagctaaccttggggcagcctttgaccatacatgcccctcatgcagtagaggcagtcatcagacagcctccagatagatggcttactaatgcccgaatgactcattaccagactatgctgttagacaaagaccgggtccacttcgggcctttggtgactctgaacccagccaccctgctccccctccctggggagcccgaggctcatgattgcttacaggtattggccgaggcccatggagcgagatccgacctgactgaccagcctctacctagcccggaccacatctggttcacggatggaagcagctttttgcatcaaggagaacgaaaggcgggcgcggcagtcaccacagagaatcaggtcgtctgggcccaggcactcccccctggaacttccgcacagagggcagaactcatagcactcacgcaggctctaaaattggcagaaggtaagaggctcaccgtgtatacagacagtcgttatgcctttgccactgcccatatacatggagaaatttacagacggagggggctgcttacctccgaagggaaagacattaaaaataaggaggaaatcctcgctctcttaagggctcttcatctgcccgctgccttaagtatcatacattgccctggacaccaaaaaggggattctttcgaagcaaggggcaatcgaagggcagacttggctgcccgagaggcggccctgaccacagacaccactaacctcctggctctagagcccaccaacgaccatcccttcccctcatgggactatgaacaaagagacatccaaaccctagagaaattgggagccgcaaaggaaccaaacggggattggacttatgaaggaaagactgtcatcccctaccgggtaaccaagtacctagtgacatttttacataagatgacacatctgagctccaagaagatgcgggagctcctcgaacgagaagaggaattcaatttccttttggggaagaacgatattctaaaacaggtaactgagcaatgtgatgcgtgcgcccgagtcaacgcatccagactgaagcttcctcccgggaaccgggtcagaggctaccggcccggaacacattgggagatagatttcactgagattaaaccaggaaaatatggatacaagtatctattaatttttgtagacaccttttcaggatgggttgaagccttccctactaaacatgaaacagccaagatcgttactaagaaattgcttgaagaaatctttccccgttatgggatgcctcaggtattgggaacagacaatgggcccgccttcgtctcccaggtaagtcagtcagtggccaccttattggggattgattggaaattacattgtgcttatagaccccaaagttcaggacaggtagaaaggatgaatagaacaatcaaggagactttaacaaaattgtcgcttgcaactggcactagagactgggtcctcctactccccctagcactctaccgcgctcgtaatacccctggaccacatgggctcacaccctttgagatcctgtatggagtacctactcctatcattaactttcttgatcaagatgtctcagattttgctaactccccttctctccaagctcatttacaggccctccaactagtacaacgggaggtctggaaaccccttgctcaagcttataaagaccagagggaccatcccaccatcccccattcctaccagatcggggacactgtttgggtccggcgtcaccaggccaagaaccttgaaccccgctggaagggaccctacatcgttttgcttaccactcccaccgcactcaaggtagacggcattgcagcttggatacatgcttcacatgtaaagccagcccaacccaccgattcagccactgcatcagaatggaccgcacaccgcactcaaaatcctttaaagataagactctctcgtacaccctcctgttgattggttgtctgtttaccccccatgtagcaactaacccccacagggtttataatatcacctggaaaatagccaatctagggaccggggaaatagccaacctcagcacttatatagggactctacatgatgggttccctcctctctatgtcgacctatgtgacttagtagggtctgattgggatccctctgaccaggaaccattcccagggtacggatgccaccaccctgggggaaggataggaacaagaagcaaggatttttatgtttgccccggccataaaccaactcatggctgcggggggccgcaggaagggtactgtgcaagatggggatgtgaaaccacaggggaggcttactggaaaccctcttcctcttgggatttcatcactctcaaacggagggagatcccagggtacgcagggaaaggaccatggagatgtgggcaaagagcctgcggaccttgttatgatagtgccggagggggaggttttcaaggcgccacccccggaggaaaatgcaaccctctcatcctaaggttcacagatgctggaaaaagaactacttgggatagtcctaaggtctggggactcaggctgcaccgagcagggaaagatccggtgactttattctccctgtacagacaaattactcccctaagccaacaatcagttgggccaaacatagtaatagcggaccagagatccccaacccattttcaagtccctaaaccccctaccgttcctaaagctatcactcctacaccaggtgctgtcaccttctcccccaccccagatgccctaaacatcgagataaccagagaccctccaggtaccagagatagattattacaattaatccaaggagtttaccaagccttaaatttttcagaccccaacaagactcaggaatgctggttatgcctagtttcccggcccccatattatgaaggcgtggcaatactgggcaactactccaaccagacctcagcacctaccagttgcggagctgctatgcagcacaagctcacaatatctgaggtctcaggaaaggggctatgcataggcaggattccttcctcacatcaagaattatgtaaccaagtagagccattatctcaggacagccgataccttgttgccccttatggaacttattgggcttgcagtactgggttgactccctgtgtctctaccactgttctcaacaccaccattgacttttgtatattgatagaactttggcccaaagtcacataccaccaacctgaatatgtttacagcgtactagagaaatcaacccgatataagagggagccaatatcctttaccgtggccctattattaggaggaataacaatggggggcatagcagccggcatagggaccggaaccgttgccctacagggaattaatcattttaagcttctacaacaagccatgcacacggatatccaggtcctagaagagtcagtcagtgcactcgagaaatccttaacatcactctctgaggtggtcctgcaaaacagacggggattagatttattatttttacaggaaggggggctatgtgctgccctcaaggaagaatgctgcttttatgcagatcatacaggaatagttagggatagcatggccaaacttagggagaggctaaaacagaggcaacagctatttgagtctcaacaaggatggttcgagggatggttcgctaartccccctggttgactacccttatatccacgctcatgggacctctggttattctatttttgatcctcatatttggtccctgcattctgaacaaactgactcaattcatcagagaacgactatctgttgtacaggctttagtcttaactcaacaatatcatcagctaaagcaaatagatccagagtatctagagacctctgaatgaaagattccattcagttacaagagaaatgggggaatgaaagacccctctcccttagccctttctttctcaagtttgtctcctcttcctcctgtcggcggcttccccgatccccacccccggtggcctttccccgcccggcccgagaacaagcaccgggtggggccggcccgagaacaagcaccgggtggggccggcccgagaatgagcaccaggtgggccagcccgagaacgagcaccgggtgggctggcacgagggcgagcaccaggtgggtcagcacgaggacaaacaccgagtgagccggcctggagctctgcccctgagcccccgccccgcccgaagagaaacactccgtcccaaggtctccgcccccaaggtcagccatcaggaaaagggggggaattgagtctgctgtaccagacaccagaccttgagaatatgctgatctggaatggctctgtgtctcatttgaaccatccaatggaaatgattctgtatttcgcctcatttgaaagactctgtgtttcacctcatttgaataactctgtactttgcctcatttgaataaccctgtatagcgcctcatatacattgaccaatgggaatagctctgtataatgcctcattagaattatccaatagaatccttgctcctagcttgcgccttttttcctatataaggaccccttttcccttggctcggggcgcttagccacacagaagctaagtcgccccaggtacctgcgtctccaataaagcctcttgtttttacatccagttcgtggcctcgctgattcctgggtgtgtgggtctccctctacgaaagtgcctcttcggggtctttcacatgttcatttctgctgcagctctcgggtccccactgtgcctgttttcagcccgtagcacagggacccagtgtgaacaccaggagtgggcaggcatggagaactgcctcctcagtgaaggaaaaccattcttcccttctgataactcgggttctccccggtcaaccttacagagttagagaccctcgtccccacttaatgctacccaagcactcttgtttcaccctgtttctaatacccaccactcacacagctccacaaaacccaccacacctgctctgtggtagccaaataccccagctcttctcctcccctcacctcctagcctcctggcaatactgcgtggccaggcacagcccaggcctcctccattttatttctatctcctgtgaagccactcccttggccccagccccagctggggaaaagagcacaggagtgagtctgaaactctccctagggatttcaagccagactgacttccagaaagccccgaaaggggaagaaggcatgtttcgaaagctctagaaggaagaggtactgcccaggacttggtaccaggcaagagggcacagaaagcaacagacggggcttgtggtctgcgttccacccctcacaccagctgtttgcgctcacccgagttgccttctttcagccctggattttctcctgtgcatgaggaataacgctcctgttgaagccaggaatggtggctcagagctgtaatctcagcacttggtagactgaggcataaaaagggccatgagtttgaagctagcctgggctatagagttaggtcctgtctcaaaaacaaaaatatagtcagacggtggtggcacacacttttgatcccagcactcggaaggcagaggcaggcggatctctgtgagttcaaggccagcctggtctccagagcgagtgccaggataggctccaaagctacacagagaaaccctgtctcgaaaaaacaaaataaataaataaataaaaaagaaatatctttttttttttgagtcaggcaagatacttgagttttattatgtctgtctaaaagcaggtgttaggcctatttgtagtgaagcgtggtgtgctggcgctgcaacaccggtgaggaagcaggaacctgatctcagagcccaagaactgcttgacagcaggccttcggcacttgccctctgaaatctcttccaccttcatcaggttaatggagtgtgcacgggcacagtgcgggcacccgtgtcttggtagcactgtttgacggctccagcagcggtcaggtcccggtattcttggcacatgttgtgtgtgtcatgttgtgagttgtagtgcagccataccgcaaagttcttcacccgcagtggggcctcaggtcgcactgcacagtgtacgatctcctcggatgacttcttcatcttgttcatctgtgcccaaaatcgggacttggccaccacatggttcgtcgcaaagatgtgcatgaggtataggagtggtgtgtggcacttccgggtgggcaagcagcgccccaccaccttgtactcccgaagcgtgcctgaggccttcgtggctgatctgtccttgttggccgccagccacaaaaataaaaggaaatatcttgcctataatgttacaatcccatccagcacttgggaagccaaggcaggaaggcctctgtggatgagaccagcctgggctacagagtgacaacctgccaagagaatggggtgggtaatcccaaatcttgggtatagtgaagtacaggactcaagagacagaggcaggaggatcatctccagttcaagacaagcccgagctataaggcctcaaaaacaaaaaaagaatattagatctatgatttattgctataaacactacaacttaaaaaaaattaaaataaggacagcaagatgactcagtgaatgagggtttgaatttgatccccagtacccacatagtacaaagagagaactgactcccataggttgtctttccgtgaaaactctccctcccttcctccctctctctttctctctctctaaatgaaaatgtttacatcaaagcctctacaaagagcattcatgttacacctagcgttggagagatgtctcagtggtcaagagcgctgacttctcttccagaggatccaggttctattacaagtacccatgtggcaattcacaatcatttataactcagttccaggggatctgactccctcttcaggcctctgtgggccttcatgtgtgtggtgcaaagacttgcacgaaggcaaaacactgtacacataaaataaaaataagagacagaaaagggaatttattcagtgtggccataccagaaaagatgagaggaccagtctcttcaaccctgtttttggagtgcagatggtagctctaggaatttacaggagaagaacaaaaaatgggatgagctggtggtgcaggcctctcagtgcttgagaggcagaggcagaggcaggggaatctctgtgggtacaaggacagcctgactgacctggtggattccgggctaaccgaaactacaaaataagacactacctctaaagttaaaacaaaaaagggaggcaataagtatgcatagctaagcattctattctattctgcccaaaccactctaattgacggctacctccagtctgaagtaagggtcctgcagtagctaggaagaggactacctcccaggctgactgttcctggctctggcaacaaactgaaaaggaaaactggttcagaaggagatcagagcagaggggccaaattagaacgaggattgtgccttccttcaggtttagaacaaccactggagaattttaggtactgctgtggtagtttggaacaagacgaggcaaaaacttattactggcaatctgtaatgtccccataaatcctttttatatctatttttaaaaagatttctatattatatgtacagcattctgtctgcatatatgcctgcaggccagaagagagctccagattttattacagatcgttgtgagccaccatatggttgctgggaattaaactcaggacctctggaagagcagccagtgctcttaacctctgagccatctctccagccctctattttattttttaaaagaattattttatgtgtatgaatatttgcatgtatgtatgtgcaccacattcatgcagtgcctatggaagccagaagaggacgacagattccctgaaaccagagttacaggggctgtgagttgctttatggtgctgagaactgagcttccttcctgtacaagaaaagcacatgctgttaaccactgagctgtccctccagccctccccacccctttgtgtgtgtgtgtacttgtatgtgtatgtatgtggacatgtgagcatgtgtggaagtcagaggatggtttgcaggagttggttctctccttctaccctgtgggtcctagggataaaactcaggctggtagcatgtccctctacctgcaaagccatctcctgggctttgtcccaataaatttcttgctctcccttggtatcttcattcttaaagggaaggacagagctacaggtacaatgggtgaaaattggcctttagttaccagtcttgaagatgagtacttaaatttttttcagaatcctttttttttttttaaatctttttatttatgtatacagtattttgtctgcatgtatgcctccaggccagaagagggcaccagatctcataatggatggttgtgagccaccatgtggttgttgggaattgaactcaggacctctggaagagcagacagtgctcttaacctctgagccatctctccagctcaagaatcctttttttttttttttttttttaaggcagggtttctttgtgtagccttagttgttctggaattaggtttgtagaccaggctggcctgaattcaaagacccacctgactctgcctcccagggtgctgggactaaaggtgtgtgccacgacacctggctaagatgagtgctttttaaatgcctatcacatctacaggcacaactgattgggaagctgattcaaaccttgagatagcaaagggatagaggtgttgatgcaacataaagacagagatgcccagattttctccttcctttagtcactgggcgggactctgcaggtccagtgaggactcactggctctcttgttaaagccttatttagagttaagccaatccttggaagaggcatcattcattcattgaacacttgcagtgtgttaccctgttaattcagcagaaagcaagacagctttaggccacacctggagcagctggaccagagaccaagtggaagcaggaatgctgatgtacacttctcatcctgatcccctggaggctgtcagcctgggccacacagtgcgagatcctgcctcaaaaacgtttttgctacccattggtgattgtacatgtactttgttctagcactcaggaggtagggccagcctggtctacaaaggacagccaatgctacacagagaaaccctgtctagaaaaacaaaacaacaacagaaacttttttgtctgatgtttcatcttgtttcttttctaataatgtactgggcagagaaaaacaaaataatgcagttgggcctggaggcttagacctgggattccagcacttaagagatagaggcaagctcattgctttgagtttaaggtccctctgccctgcatagtgagttgcaggtcagtgtggactatagagtaagaccttgactttcaaaaagcacaaggggccaggcgttggtggctcacagctttaatcccagcactcgggaggcagaggcaggaggatctctgtgagtttgaggccagcctggtctacagagggagttccaggacagcctccaaaacaatacagagaaaccctgtctcaaaaacaaaacaaaacaaaacaaaacaaaaatgtcaaaaagcacaagggccatcaaaatggctcagtgggcaattacaaacttgatgacctgagtccattccttgagacctacataatggaaagaactgactcccctaagttgtcttctgaccttcacacataccgtgtgtgtgtgtgtgtgtgtgtgtgtgtgtgtgtgtgtgtgtgtgtgtacatgcacgcgctctcgtgagcaagtacgctcctgatactaaattaataaaaaggattaaaaaagtaaaaccacaaacatgaaccaaaccaatgtggtgtaataacctatgtctggagaactaacaggtttctggacccagagaggtagagaagataatctaatgtcttcaggggaattagggggataaagcatcagagcataaagaaagtttccctcacttgggaagtagtggaggcaggagcatcaggaattcaaggtcatctcatctatatagtaagtaagttcaagactagcctgggttacatgagaccctgtctcaaaaaaaaaaaaaaaaaaaaaaaaaaaaaaaaaaaaaaggaagcatggtgcaacagatttgagattgaaacacaaaaatagctcaactctggggcagacagcagagtcaggggaaagtctaaggaagttctggggaaagggtcaggaggcccctccctgcttcattcacgccccaaacatctattaaacattccatgtgtacttggtgtttctggcctgaggatgactcacagaggctgacacactaagttaatcacaggaagcacagaagaaaaaaaaaaaaaaaagaaaaaacaggcctaatgcaatggaatgcctgactgagggggttcttcacagtgctttggagacgaccctttgtgtctcattgaaattcatctctcaagaaacactcctcaaatgtttacacattgtcaggcactttgagctgcagggacacagaggactcagttctggtccctgcctttggaattcacaattgttgctcttccaaagaactggggttcggctctcagcacccacttaaggaggcccatgaccatttgtaacttcagctcaaccgcttccacaagtacccacacacatgtctgtcccccaaacacacctatattcttcatgctaaccttgtgacactatgagcaaaatcaaagacattaagaagccaggttcagtgccctgtgccttagtcctaacatttgagaggctaaatcaaacaggaattgaggccacttggacagcatcaagagaaattatctttgaacatatgaaatgatattatcacagaaatagaattgcaatttaaaccaggtatgtgatcccctctccccccaccaaaagaaaaaaaaatagagggctggagaaatggctcagtggtaaagagcacctgctgttcttgcaaaggatctagattgttttgttttgttgagacagagccacactatgtaactctggctgtcctggaattcactatgtagatcaggctagctggtatgtatgtctgtccacaaatgcatgcctggtgttagaggcttccagaagtgtgtgtcagaccctctggaactggagttataggtggttgtgagctgccatgtgggtgatgtaattgtacttgggccctttgcaagagcaaccagtgcccttaacccctgatacttgcttttaaggaatttgcatttttgttttgaaattacatgttggaaaagttttccacatcagtaagaaatgccatccttactatttcttcctgcagcttctcagaaatattttttaatctttttttttaagattttatttatttatttattatgtacacaacattctgcttcatgtatatctgcacaccagaagagggcaccagatctcattcaaggtggttgtgagccactatgtggttgctgggaattgaactcaggacctctagaagagtagtcagtgctcttaacctctgagctatctctccagcccctcagaaatattttaattcaaaaatctttcttagccagctctcaagccactggattacttcttgcttctgctactgacatagacttcatcttgattcactccatacagcaactagatgtgtgtatataaatgacagatagatcatagatggatggatggatggatagatagatagatagatgatagatagatagataatctcacttgctacctaggctgacctcaaactcatgcctcagtttcctaagtgatgtgattacgggcatacactattatgcctagcataaccatttgtttgccttaaaattttttaagattaattttttattatgtatacagtattgtgcctgcaggccagaagagggaatcagatctcattacagatggttgtcagccaccatgtggttgctggaacttgaactcaggacctctggaagaacagccagtgcttttagcctctgagccatctctccagcccccagcctttaaaatttttaattaattttttttttgtttgtgtatgggtgtttggcctgcatgtaggcctatgcactatatgtgtgtagtactcacctagaccagaagagggtgccagagactctggaattggagtttcagtgcatgatgagctgccaagtgggccttaatccccaaaccccagagggttgaagagggatcagtggctaagggtgcttgttcttgcagaggacccagttttgattcccagagcccacatggtagctcagaacaagaactccggcttcagaggattctgcaccctctctgggcctcatctggtaccaggcatacatctggtatgcagatatatacacgccctgagtggtgacaaacactctgtgagttcaaggctggtctacatagagaattccaggacatagtgagaccctgtctcaaccaaacaacctggatcctttgcaagaagagcaggtgcttttaaacactgggccatctctccagcaccacctcccccctttaatgatacataggtcccacatagcctagttcggcctcttaactcctgacataacacctcatgaattcctcatcctcctgcctctaccttttgagtgagtgacgagattacaaacgttcgccaccatctttgttcccagttggccctcaaggccccagggtctcagttcagatcctgccactatggatacatagcattgaaatggggaaggctgcctctgtgctgcctcagcctttgggtgacgcctcttgcttggcactgcattttcaggagcatgacatctttgctctggaccctgaccccaaggttgtgtggagctgtaagaagtgtaagggtgtctggtattggtggcgcgcgcctttaatcccagcactcgggaggcagaggcagcagaggatctctgtgagttcaaggccagactagactacagagcgagttcaggacagccagggctgttaacacagagaaacactgtcttgaaaagcaaaacaaaataaaaccaacaaaacaacaacaacaacaaagtgttaagcgcgcatgcaaccagccactgggcaattagtcaaagatgccaagtctagatagacatgcagttaagaacttagggtctagagagatggctcggtggttaagagaccagaagagtttgcatcccagcgctcgcacagtagctaacaacagtctatcttacaccctcttccagcctctcctggcacaaggaacacacgtggtgctcatagttacaaaacagacacaacacgcatacacaaagaaataactaatttttaaaatgtcttgtaatcaagtaaaagtgctaactctagggactaaattaattcctcagtcgccctactccaggagcggtaaggctggccagaaagaccaagaacgcacgcgcggaggagaaaccacagagtcggtcctcccgggatagagaggccggaagtgctcgcggagctgcacgccgggtgctggaagcctactgagccccgaggaagggctccgctcggggcttggcgtggtgggtgagccggagggtcggcgtgagcggcctgggctttggttctgaatgatggcgtctcgggcaggcccgcgagcggccggcaccgacggcagcgactttcagcaccgggagcgcgtcgccatgcactaccagatgaggtatgaggtgagccaggagcactgaggccttccccgggaggagcctgcgggtctcgggaagcgacgcgggcgagcctcacggtgccgctcccccagccagctgtcgcgtactaccgggtccccggctccggcgagcgcctcgggtctgtttacaggccgggaagcccagtggcctgccctcgcccgcctcgtgctttgaggggatctggcctgcagaggctcaggggtcgatgctcagcccctctgaatgaccttggagacatcatttttcttttttcaaatcgaggtcccgcagtgtctagagttcaggctggcctggaactcacggccttccctcctcagcctcccgagtatgcgcctggtctgaaaactaacattcttaaagaaaactgcgtgtgtgcgtgtgtgtgtgtgtgtgtgtgtgtgtgtgcgcgcgcgcgcgcgcgtgtgtgtgtttgtgtgtgtgtaagtttgcccacacgagagcaggtgtgctggcagaatgcagtgccagtaaagggtgtgtgtgtgtgtgtgtgtgtgtgtgtgtgtgtgtgtgtgtgtgtgtgtgtgtgtgtgtgtgtgtgtgtgtgtgtgtgcgcgcgcgcgtgtgtgtgtttgtgtgtaagtttgcccacattcttaaagaaaactgcgtgtgtatgtgtgtgtgtgtgtgtgtgtgtgtgtgtgtgtgtgtgtttgtgtgtgtgtaagtttgcccacacgagagcaggtgtgctggcagaatgcagtgccagtaaagggtgttggatctcttggagctatagttacagacgtgtttaaatccacctgagactagtactgaggaccaaaccccgaagtgattttgtgagatagcggcttggtatggggtccatgctagcctccaggagcggcaggtgctcttaaccactgagccatctctccagtccccaggctgtcttggaacttgctctgtagaccagactagaaatcagagatctgcctgcctctgctgccaagtgcaaggattaaaggtgtacactacagccgccctgttgaccctgtctttaggaagatgtcatgtgtactttacaaagagttttgatgtagtcatgtcttaagctttgttgtcacacaagatgaaattaattaccaccagggaatttttcatcaaattgtgctgtacttaaatatgcctaaagtaaaatacttggggtcagactcttgaagtttaaaccaacaccaggtactgagttgtgttgaacccacacaactaccttgcctcctgcagattgttaactctgctggctgtggtggttgaagagacccccacattggcttagctgttaagagcacttgctgttcttggagagggtctaaactcagttcccagcaccgacatcaggaggctcacaaccaaacacctgcaactccggttccaggggttccgatgccctctggcttcccgacagcacaggcgtgtgcgtggtgcacacacatacacatgagataaatttttaaaaagaaagaaaagccaatctgggtcctgccttcaaggagcttgagtgccagaagtgattcttttctccttacctcccacatttcctataacaaattaattttccccttaaatccactgaattattcaactggttcttggcctctttctttacagaaggatgacaagccctttggacccttctttttcaactttaggcccctgcctaatggatgctcttgttttcatgcgtacctagagcagacaccttgcttgtgacaatatgaaaaggatataattgagaccccgagaagatcaggactaagagatgtgcctccttctcatggaaactatatctggagaaatacagggagcccaaactgtgttccttgttgctaggcctccccctaatggcctttgtttctgtgatacgaagccatctttctaaccacagctcagaattcttgtcatggcttggtgagataatgtcttagtacgttgtccaggccaacctccaatcagagatcctctgcctcagcctcccaggtgccattactgttcttcagtcttgaagtctacacatgcatggtctttgtaactgttactacctctctgtgccttggcagttgatttcctgaaacacaaatactaaaaagcttattcctttgtgcctgcatgtttttgcctctgcgtagaagcccacttccactcgtctcattacctctgctgaaatagctctctcctctagatataaccttctctggctttccatctcatgctaattggttcttccctgggatagcggatatcttcggtttatatgtatttacttgagttttatacttcatgtttcccagcctctatcagaggctgtgtcattcagattgtatctatgtgtccagtaccggtgcctggtggtcggagcaatttaaatgaaaattgcttctccctctgctctgccttacagtgtgacgctcaagagtgaaatcaagaagctgatctacgtacatctggtcatatggctgctgttggttgccaagatgtgtgtgggacacctgaggctcttgtcacatgaccaagtggctatgccctatcagtggaatatccatatttattgagcattgtgccctctctcttgggccttctctccttcctcgaaacaacattagctacctggtgctctccatgatcagcatggggctcttctccatcgctcccctcatttatggcagcatggagatgttccctgccgcccagcaactctaccgccatggcaaggcctaccgcttcctgtttggtttctccgctgtctccgtcatgtacctagtgttgatactggcagtccaagttcatgcctggcaactgtactacagtaagaaactcttagactcttggttcaccagcacacaggagaagaaacgtaaatgaagcctgcctgatggacacatgaagggagctgttcagaatctccatggactgtggcatctgtgatgttggcacctagtgcacactatcctcagattttggccttgagttctctgttaccatctgctgagatgacaaatctgtagtgtttaatttattcttgactagccacaaaccggatgaccgatgtctgtggaacacttcaagttgaggccctccagactgagccttatccttgccttctcttggtcaaattccttacttccatttatcacctcttcatcaccgatactaaaagagatctggaataaatcagtgcagaaattctacttcaatctgtaggtcatggggcaagcaacatttgggaagttgctcccctaaaggctactctgtttactgcaaaccattttaattaaaaaagaacttcaataaagttaagactgtcctgtgctttgtgtttgagatttgattgaatttcaaagttgtattgctctagaggacttagacattatgagaagaatagatgtttcctgagaacatgggactggcgctggaggagagacagtgtgaagagtcttaagtcagctgcagccctctagctcttaggtgagaacaaccctgggatgggggttgctggaggaatggctcaggggttaagagcactgacagaggacacaggtttagttctcagcacccaaatggtgacttaaaaccatttgtaactactgtcccagggcatttgacgccttcttgcctccggatgcactaggcagacatgaggtacaaaaacaaacatgcaagcaaaacactcaaaaaattaaaaaaaaaaaacatggtctctcaatgtagctgtggatgtactagaactcactaagtagagcaatctgggctcaaactcacagagatcctcctgcctttgcctaccaagtacagggatttaaggtatgtgccaccacacttagcaatatatatttggccagacatttaatctccacccataaagcagcttatttggcttggattatgagctcccctttttatgcttgtttgagacagggcttctctatagctctggctgtcctggaacttgcttcgtggaccagactggcatcaaactcaaatccacctgcctctgcctcccacgtgctggcattaaaggtgtgtgcatcactgcccagctgggttacgagctttctatttggttatttatgtttattagacttttatgtgtctaaaactgagtaataatacccaaaaagaatctgcttgttggggctataattttccagtaactgacaaataaacctgagtcaaaataagaagaaaggggtttgagttctttttcccttttagtttctgtcattgattattccttggcctgcttgtttggggaatgtgcaaaggaagctgctaactctatggaagccagaaaaagaaaaaggtgagattccagtgtcgccactaggggcagactgccagtgacgtaacttcttcactcagcccctcccaaagcttcctccacctccaaaaatgtcaaggactggtaactagtacatgggcctttgagaaaagatagcagggagcttccagtcttgggggaatgtgcagtgaacataacatctaattgtgtgagagacccacagctgagatacagtttaagagtcacacctagaagtcttcacagtaaataaggcagcaaaggtgtgcatccctttgcactggactttattatgcctagatgatgctcagatctgtaactgcagagatctggccactacagttgtaattcttttgtcctggaaatgtgttgcttgtacagtctgcaaagctaattcctccagctatcccactgatcatttctttggagcaggggcagtttccagacagaatttctctgtgtagtcctcgctatcctggaactcagagatctgcctgctgtgtgctgggactaaaggcatgtaccaccatgcccagctcctactgatcatttcaaagataacttcttgtgcctcaggcctattgctgttcctgcttcctgtgtttacgggaacacagctctggatcatccaccctgcaagtttaagtccgtccccactccatatacacactgcctattcggtgaacctcctatagataccctgataagttccctagcttctcagtttaacacttagaactctccctacttaagggaggcctctcagtggtgaagtgctcctctagcatgcaccgaggcctgggtgtgactccctcgtaacaacaaataaaaacaaaccttttctgctcttacattcctttattaatctttaagatgccacttgtatgaaaattcctcaattttcaattcctcaatttgaagaacaactttaatttgtctggttgctttcaccttattcctttattattattttctaacaagacagagcccagaatgaccttaagctatgtggctgaggatgactttgaactcctgatgctttgtctctacttcctaagtgctaggattacaagtatgcaccatcactcctggcttatattactcgtcccccacccccaccccatagaccaagccttgacctttatttttaaaagctgcatatttattctgctttctgacttagtgtttgtgccttcaacactttcacaacccttttctctcctcaataaggaaagcctgcttgatcctgtcacggacacacttggcacacaaggagccaccacagcccctgctgacgtgcttctttgtctagacagtctcataaggactttgggtctcacagcatgaacccttcaagtctgcctgggcacacaccacatggggattcaggtgctttcccagtcttcttggtataaaggtaaacaatcctgttgccagggttcgagacagcctagtttcgttagaggctgtattgtaggaaagcctacaatggtatgtcaaacactggaccattcgagtgcctctaagcaccatccctggaagaggaagagctgtattatttgttttatattgacagaattgctactttgtatgtcttctgtagctcattagtgttcactctgagcttattgaatgaattaacttgcccttttgaggacaaaggtctgtatttcacagaaaacagaactggactgaagcagaaagaagcccatggacaagggagtttgtcatgagcttagctgaggcacacattgctaacttcaaacaactgtgatgcaaacaattaaaactgcagtgcagacccccctgctttctcccaataaattttccacataagttctgtcccccccccaaaaaaaaaacctgttagcacattattagtcaaagagctaaaacctgtttttggtcatcagaatagtgttttactgaaagtctttgaataccttgtagactaatttcactcattgtgaaattagtcaacagttttaaaacactatcatgccaacatcagtttttgttagttttgtgcttggaattctgcttttctagccttttcctataacttttttctgcctcatggttatggtgttcacaagtcctcttgatttagtgggaagaatgctatttgggttagaaagttcagctgggtatgggggtacatgtctaatcccaacctttggcaggttgaggcagcaggaatactctgagtttgaggccagcctgacatacatacatacatacatacatacatacatacatacatacatacaaacactatctcaaaaaacaaagttggagttaaagtatcaaccacaggactaagatcaacctgcctgttcacaggttgctttaaagctccaatagccggttggagagatggctcagaggttaagagcactggctgctcttccagaggtcctgagttcaattcccagcaaccacatagtggctcacagccatccattatgaggtcaggtgccctcttctggtgtgcagatgtacatggaagcagaatgttgttacataataaatacataaaatcttaaaaaaaaaaaactccaatagccaaagtattatgaaggcattctaaaatttttaatttattttcattttatttttggagacacagtttctctgtgtaaaaaccccaactgtcctggaactcactctagaccagactggcctccaactcacagagataaacctacctctgcctcccaagtactgggattaggccgggcagtggtatcgcccacctttaatcccaacactcgagaggcagaggttggtggatctctgtgagtttgagaccagcctggtctgcaagagctagttctaggacagcctccaaagccacagagaaaccctgtcttgaaaaaaacaaaaaacaaacaaaaagcaagttaatctggaattaaaagtgtatgccaccacacctgatgtaaatttaaaattttttttaaattaatttttctatacacaggtgttttgccagcatgtatgtttgtatagcacatgtgaacctggtgcctaaaaagccaaaagagtgcatctgatcccctgggactggagttacaaatggagtgctgccatgtgggtgctgagaattaaaaccaaatcttctagaagagcagccagtgagtgcccttaactgctgcagcatctttctggctcttgtgaaggcattttatggagtctgtaacaccatatgggtatcaaaagccgtgtggtcacctgatctttgcagcaagacaggagagagaaggtgtttgagagacttgagggatggtctagacaccaaagaaaggtttgtgtgttgtgagcaatgactgattattaggttgagattctagccagggagtttactatctcttgtttgatttattacattttattgccatcctaggaattaaatagggttttacatttgctaagcaagtgttctctcaacatccttatatcccctccccgatttctgacacttactatagctcagcttgtccttgaactcagcaatcctgcctccatagtgccgggattatggatgtttccactcccagctgagcctgttcttcatgtgttgcatgggcattgcagatctctcccattgctgtgaggctgaaataaatgtggatgaactttgtagtacatagtcgtttacatatcaagatgcctttccttggtaaacagtgttatgcttgcctctcaaattgggagtgtcttcctgttttaagaataatcctcttccctcttttcttcctctctcctcctttcccctccttctgacagggtctctttatagaatattcctgcctctctctgccttccaaatgttgtgtaggtgtacatcaccatgcctgcctagttagaatgacgtctcagaatgctggaggttaatttcacattcttagtccacattatcctgactggtatgttcaaggtgccctgacagtaggtacagacccagcagacctcaggaagtgaccattacagcaagatcctgtagctgctactcatagcctgttgggagcccgtgcataggaaagaatggcaagaaaaaatggctgccagagggcgtccccatagtatactctgtcactaagcatgcatgcttcagagcttgccaaaacctcctgagtccctggcttggtccccaaataaaggtcattagagcatgaagtcttggtcaactgattgagactcctttggagagtgcaaggcttctatgtagatgcccctgttgcctcctattctgtctaatttcttactctccctgttgacagctgccaatctcctttctcctaggactgtgcccactcatcactcactgtgataagacccctttccttttctttgttccttcctggtctgcctgcctgcccccccccccacctctcccttttcatggtctcatgaaaactgctctcagactcactatgtagctaaggatgactggagctcccaatcctcctgcccctacttccctaattctgggattacaagtttatgccaccacattccactttctgatttccttccttacatcttaattccactagctttatcacactgctaaagctaaaactttctttgcaaaatgagatccagaaacccacagactctccatagtaggttctgacagggaaacagctgacattgtatggtgttctgccttcccatttctttgctgtgtgtgtttttggacaagtctcggtcttcctgtatttccttccttccttccttccttccttccttctttttccattttttatttgaattataaacacgattgttttacatgttaatcccagttccctctccctcccctcctccctaccaccatccccaactaaaaccctacctatcacatatcctttctgctccccagggagggtgaggccttccataggggtcctcagggtccgtcatatcctttgggatagggcctaggcccacctccgtgtatcttggctcagggagtatccctctatgtggaatgggctcccaaagtccacacctatgctaaggataagtactgctctactacaagaggctccatggatttctgaggtctcctcactaacacccacattcaggggtctggatcagttccatgctggtttcccagctatcagtctggggaccaagagctccctgttgttcaggtcagctgtttctgtgggtttcaccagcctggtctggacccctttgctcttcattcatccttctctgcaactgtattccagttcagtttagtgtttagctgtgggtgtctgcttctacttcttccagctgctggatgaaggctataggatggcatataagtcagtcatcaatgtcattatcaggggagggcatttaaagcagcctctcctctgttgcttagattgttagttggtgtcatctttgtagctctccaggcatttccctagtgcctgatttctctgtaaacctaaaattttccctctattatggtatctcttatcttgttttcttctattcttcccccaactcaacctttctgctccctcatatactcatcttcccttctcattctcctagctccttcctccccttcccaatttgctcaggagatctggtccctttccccttctccaggggaccatgtatgtctctcttagagtcctccttgttacctagcttctctggctttttttttttttttaagatttatttattatgtgtacagtgttctgcctgcaggtcagaagagggcaccagatcccattacagatggttgtgagccaccatgtggttgctgggaattgaactccggacctttggaagagcagtcagtgctcttaaccgctgagccatctctccagccctttctaaaactggacattagcctagcctcaagggttgtgatgctaacaatacaagctaaagagagcaatgggcatgatccaaagccagatagttcagcaaatattgatttcatcccttcccttttcggaacagactccagccacaccaaatatgtaaaccagcaagacaaaaaacagcaggctatcttttcccactttttgctttgtctatgtttgttggacaatgtcaaactatgtagcccagaccccttctgtaactttccatgtagaccaggctggcctccaactcaaattcccagcaatctacctgtctctgcctctggagttctgggaataaaggtgtgcatcaccatgcctggcctcaataagtccttgtcttatggtcttcttttctcctcctttacttcttatcctcctccctctctcttccctttccctttatctttatttctttattgtcaccgtttcttttctgcttctcttaccatgctttaacaaccatcaggaagcaactaaccaaatgttctcatcttgagagtcaggtcagaagatctaggagtcaagaaagacacgtgtaaaatagagctcacataccaagcattagaaaactcgcagtggcactaaaagatggctcaggggataagaacacttacatggtgactcacaaccatttgtaattccagttgcagacaattcaatatctccttctgatctctaagggcacccagaatgtacatacatacattcaggtaaaacgttcatatacattaaaaataataagccttaagaattagaaaagagggctggagagatggctcagaggttaagagcaccgactgctcttccagaggtcctgagttcaattcccagcaaccacatggtggctcacaaccatctgtaatgagatctggtgccctcttctggtgtgcagatatacatggaagctgaatgttgtatacata

SEQ ID NO: 11 - DNA, 8340 bp, synthetic construct
  source 1..8340: mol_type = other DNA; note = CHERV-3g Genbank Accession No. MN527962
ttttggttcggcccagacgagagtctgagggccatttggaggagggagaagagacgaagtctcatttctctggggaagcggccgccccagactttgcttccctcccgctttgtaacttgttttttggttgattagcttttggttcggcccagacgagagtctgagggccatttggaggagggagaagagacgaagtctcatttctctggggaagcggccgccccggactttgcttccctcccgctttgtaagcttttggttcggcccagacgagagtctgagggccatttggaggagggagaagagacgaagtctcatttctctggggaagcggccgccccggacttggcctccctcccgctttgtaacttgtttggcgccaactgtctaccgcggtccgtcctgtctgttgtatttcgttccactgtgcttgttattcgtgtcaatctctgcttcttcccatgggtcagcaactaactacccccttaagtttgactttaggtcactggcaggatgttttgagccgagcacgcaaggaatcagtagagatccggaagaaaaagtggcggactctctgtttctcggaatggcctgctctcaatacaggctggccgagagacggtacctttgacctcactactatcttacaggtcaaaactcgtgttttccagccaggaccttggggctaccccgaccaggtaccctatattgtcacctgggagagcctgagccgtgatcctcctccctgggtcaggcccttcctcccaccccgtctttcgggcccctgcccgacacctctgcctttgcctgctccacttatccctactccttctgcacccccttcgacttcttccctgctccccttgacagagccccgatctcccaaccctaggcccaaagcccctgccgtcttgcccaatacacaggaggatctcctcctcctggactcccctcctccttaccctaatgctgagcaggcagcatcccagctcccagcagctgaccagagccccccaccaccgagctctactaccggagaccctggggacccgtcgccaccgtccacccgacttcgatctcgaagagacaaaacactggaggggcctgacagctctggaatctcccaggcttttcccctccggtcgatgggggaggggcgttaccaatactggcctttctcctctgcggacctttataattggaaggcacataacccccccttttcacaggacccccaggccttgacaggtcttattgaatctatcctcatcacccaccagcccacctgggatgattgtcaacagttattaggaattctcctcacaaccgaggagagacaacgggtactcctagaagcccggaagaacgtcccggggccagatggcagacccacccagctcccaaatgaaatagatgaagtctttcccttgatcagaccgacagactgggacatcaacacagcagccggtagggagcgtcaccgtctttatcgccagactctgttggcgggtctcaaaggggcaggaaggcgccccacaaatttggccaaggtacgtgcggtagttcagggcttggaagagacccccgcagggtttctagagcgtttgatggaagcctacagaatgtatacaccctttgacccccaggctcaggatagggaagcagatataatcatgtcattcattggacaatcggcgcctgacatacgcacaaagctacagcgccttgaggggctacaggggtacacccttcgagacttagtaaaggaagcagaaaagattttcaataagagagagactcccgaagaaaaggaagaaagattacgaaagttacaggaggacagggagaatgtaagagacaaaaagcaaaaccaagagctagctaaaattttggccactgtagttcaaggatcaaaacatagaccaggtcagacagggaacctgggagacaaaaggagaacaagagtggagagaaaccagtgtgcttattgcaaggaaaaaggacattgggtcaaacattgcccgaagaatccaaggcggaagcccacccccattctccctctggaaaagggagattaggacagtcagggccaggtgcctccccctgagccccgggtaactcttaacgtcggggggcaaccagtaactttcttggtagacacgggagctcagcactcagtcctgactcagacccagggacccctgagcacccggacagcctgggtccagggtgccaccggaggaaagctacatcgatggacaactgaacgtaaggtccacctgagcactggacacgtgactcactccttcttgctggtgcccgaatgtccttaccccttattagggagagacctcctctctaaagtgggagcccacattcacttccatcagaagggtgccaccatcacaggagaggggggacaacccctccaggtactgaccttaaggctcgaggataaatatagacttctagaggatcccttacccccctcgccaaccatggagtctagctggttagaaaaatatccccaagcctgggcagaaacagcaggcatggggttggcaaaaaaacagcctcctttaattatcaacctcaagccctcagccactccagcggccattaaacaatatcctttgagccaagaggcccgggaaggaatcaggccacacattaatagactattacaacaaggcatccttaggccctgtcacagcccttggaataccccccttctccccataaagaaaccaggtacgggagagtacaggcccgttcaagaccttcgggaggtcaaccggagaactgaggacatccatccgacagtgcccaatccttataacttgctgagcatgttgcctccgagccacatctggtacacggtgctagatcttaaggatgcattcttttgcctcagactgagtccccagagccagcccatgttcgcgtttgaatggaaggacccggagactgggttttctggccagctcacttggacacggctcccccaggggttcaaaaactctccaactctcttcgatgaggccttacaccaagacctagcagacttccggatccataaccctaacctgatcctgcttcaatacgtagatgacctcctcctggcagcggaatctgaaaaagactgcctccaaggtaccggggccttactgcaaaagctgggggaattggggtacagagcttcagcaaagaaagctcaactttgcagggaacaggtcacctacttaggataccggctccagggtggccagagatggctaacagagagccgtaagcaagctgtagccctgattccagcacccaagagctcccgggaagttcgggaattcctgggcagcgcagggttctgccgtctctggatcccaggtttcgcggagctggcagccccactgtatcctctgactaaggctaacacccctttttcatggacagaggagcatcagaaggcctttgatggcatcaaaaaggccttactgtctgcccctgcactaagcctccccaacataaacaagcctttcaccctttatgtggacgaaaaggctgggatggcaaaaggggtcttaacacaacagctcggaccctggaaaagacctgtagcatacttctctaagaaattggacaatgtggccatgggctggcccccctgcctccggatggtggctgctgtggcggttctgaccaaggacgcggacagattgactctgggtcagcaactcacagtgatagccccacatgcgattgaggcagtgatccgacaaccccccgatcgatggctttcgaatgcacgaatgacacattaccaggctctgctcctcaacccagacagactgcgattcggggcagcaacatccttaaacccagccaccctccttccggatgcggatgccgaaactgctctgccccatgactgccgcctaatcctggccgagacctgcggagcccgagaagacctgatggatcaaccactacaaggagccgagcatacctggttcacagacgggagcagttttctgcaagacggtatacgaaaggcaggggcggcggtggtggacgggcagactacaatatgggccagtgccttgccgccaggaacctcagcccagagagcagagctgattgctctgacccaagcactcaaaatggctgaaggtcgtagagtcaatatctatacagacagccgctatgccttcgctacagcccatgtacatggagaaatttatcggagacggggacttttaacttcagcaggaaaagacattaaaaataagactgagatcctagagctcttgcaggctctttttctgccacgaagattgagcattatacactgccccggacaccagaagggaaatgacccagtggctagagggaaccgaatggccgatgaagaggccagaaaagcagccttggggccacaagtcctctccctaaagacctctgatccaacctcatgccaaggattcgaatacacggacagcgacttagaaacagttcaaaatctgggggccaactatgatcaggaggcaaacgtctggcgctaccaaggaaaaattctgttgccacagggggctgctaaggaacttttgtcacaactacatcgatggacccacctcgggcacaaaaagctaaaagcccttctacaacgagaagaacaaacctactatatccacaacctcaatgctctcatccaacagatcactagcacctgtaccccctgtgcaaaggtgaatacaggacggttcaagttgcctgagggaaccagggtaagaggagaacgtccagggaccaactgggaagtggatttcaccgaaatcagacccggtagctttgggaataggtacctcctggtttttatagacaccttttcaggatggactgaggcttttcctactaagcatgagaccgcccaggtggtggtcaagaagattcttaaagagatctttccgaggttcggactgcctaaggtaatagggtccgacaacggacctgcctttgtctcccaggtaagtcagatggtggccaaaacattggggatcaattggaaattacattgtgcatatcgcccccaaagttcaggtcaggtagaacgggcaaaccgaacaattaaagagaccctgaccaaattagccttagagactggcgctaaggactgggtacagctcctgcccatggccctatttagggttcggaataccccctcggtacatgggctcacaccttttgagattttgttcggaggacccccacctattatggatgtgttccctgctgatcctaaccactccgttaaccccccatcccttcaggcccgactacgagcactccagattattcaaaaccagatctggaaaccattggctgcagtgtaccaggccggaaaccctgctgtacctcaccccttccagattggggactccgtatacatcagacgccaccagtctaagactcttgagcctcgctggaaaggcccctacaccgtgcttctgaccacccccacggcactaaaggtggacgggatcgcagcatgggtccacgcctcacatgccaagaaggccaacaccagcgagaattgggtgacgaacgagaccccaaaatggaaactacagcgcactcaaaacccactcaagataagacttttacgcgatgtttaatcatttcactatgctcgatacttttccatttctcagccctagttaaaggagccccacatgccccccagcagctaacttggcaggtgatatcccagacagaggaggtcgtctggtcagtcactagcctttagccacccggtacctggtggcctacactcacccctgatttttgccatttagccgcaggtctagaaacctgggatatcctgactataggagcagataagatgacaacctacaggggtagaggaaaccgccgatttggctgtagtaataagataacccagtgtgagctagccagacttgatttctatgtatgtccccgggaggggcagccccggggctctgggtgcgggggatatactgagtatttctgtgctaagtggggttgcgaaactaccggggatgcttattggaaacccagctcctcctgggatctgataactgtcaagcggaactactcgcaacccctccaatgtagtccccatagttttggggactgggagcaaacttgcaaaggaactctttgcctccctttaagaattaacttcactaaccgagggaaggcaacctatacggcctggctaaccgggaaaacttggggtttaagatggcacatgacaggaacagatagaggagtcatattcaaggtccggttgctgatacagagccctactccacggacgatagggcctaatccagtccttagaaacctaggaaccccaaagctcccccaacctagagctctggctcgggccattaccccggttccaaccgccaccagccattccctcgccactgcctcccaagtagaaaatattccatctactagacagcgaatttttaatctggtcaggggagccttctctgcccttaaccaaaccaggccagagatgactaacccttgctggctatgccttgcttctacacccccctactatgaaggcatagccaccctagggacgtttaatagcaccactgattcatctcagtgtgattggggagcacaccatagactaactcttactcaagtctcaggaatgggtacctgcctagggcctgttccccagtctcaccaagacctttgtaaccataccctcccacagcctgtaaaacccacctacctgatacctagtccaggcctatggtgggcctgcaatactgggctcaccccttgcatacatacaggagccctcaaccaaaccaaagacttctgtgtgctggtccaactgatgccccgtgtattgtaccatccagcgggctatctggaggacatgtatggttctcatcggacccgatatcgaagggagccagtatccataaccctagctgttctgttagggattggggtcaccgcagggattggtacagggaccacggccctggtccaaggaccgcaacagtacagcgagctcaaaaatgccatgacggcagatttaaaggaattagaaaagtcaataaccaggctggaggaatcactggcctccctggcagaggtagccctccaaaaccggagaggactagacctattgtttctaaaagaaggaggactctgcgttgccctcagagaggaatgctgcttctatgtaaaccactcaggagtaattagggactccatgacaaaactcagagagagattagctaaaagacagagggaggccgaagctcaacaaggatggttcgaaggatggttcaataagaccccatggttgactaccctaatttccaccctggtaggacccctgttcattctcctcttactcctgacacttggcccttgtctcctcactaggctcctacagtttatacgtgaaaggttatccatcactcaagccctcgtcctaactcaacagtaccacgctgtgccaagcgctgaggtccctgatgtttcttctaacctaaatctgtgagtttttttaggactcaagaacgcatttaagtatcagccactgactacagcctgctcctaaggaccatgaggcccagactataaaccagtcgtgctgctgcggacactcccgactcttcaaccagctgcctctccactgcctaaatccccttttcttttgactaacatttcattttttagacccctaacgacgccccaaagtcagcaggaagtagtatgagacagacgccgcccatttacctggtcaaaatgctatataaaattgtccactaataacccaagaatgggttacctaaaaaaaaaaaaagggggaaatgaaggactttagaattaacaaagaaataactaagaagaaaaacaatcctctcaccctaagaacagggagacctgacttaaaacctaaccaaggtcacaatgacccaagcccctggaatttcttagctggcagatataactcccttacaaggccacaagacaacctaactgaataccaagaattcctagagggccaccctgccctagggtcatgaagatagaaacagactatcccactgagccaggagaccatccggccccaaagataagagatctccaaaggatctgtgactctggtcacgtacccaaacccctaaaatcctatggttttttctcttataaaaggagcctgctttagaggaacagggcttcttctttgtctgtcggactgggaagcccgtttgcgcaaacgtcccataataaacttacctcttgttttttgcatca

SEQ ID NO: 12 - DNA, 16285 bp, synthetic construct
  source 1..16285: mol_type = other DNA; note = CHERV-3g allele A
cctcccaagtattgggattaaaagagtgtgccaccaccctctggcctctacacagtattttatagaatgttctgtgtccagtgtggtggactgagcctgcaatcccagcactagagaagcattagcagaaagatttcagtcagctcagctcaagactagcctagtttatttagggagctgcaggcctacaaggtcatcacaatgaggccttgtctcaaaataaacagaacgaacaaaacctccaatccaaaaacaataacaaaacaatttttgtacagaagtgctaacatccattttataagagcaaaaaaaaaaaaaaagtaaacaaagttggcatccattaataaaagaatggctaatagacccggcgttggtggcgcacgcccttgatcccagcacttgggaggcagaggcaggagaatttctgtgagtttgagaccagcctggtctacagagtgaataccagaataggctccaaagctattcagagaaactctgtctcgaaaaaccaaaaaaaggctaatagttaattatatttatctgctataatactatgtaaaagtcctgaagattaaaaaaattgtttttaatttttatggagaaaaggaacacgagtatgccacagcaagagtatggaggtcagagaataagtttatatagcaggctttctccttttcctccatgtgtgttggtgtttgaggcttgaactcgggtaatcaatcctcaggcttgcagtggcaagtggtttaccagctgtccctccctttaaaggcagaatttctatatgaagcccaggccgacctccaactcagattagtttctcctgccaccacctcccaggtgctgggacagtagggaaggcacgtgccatcaccattaagattcgtactcacggtaagaagatgtatattttacaagacagtacaaaacatcgactacaaagctgtatcatataaacaaccagacgatttgcctcacagttgttattttcgggggtggcatgctggatgatttttttttctttgtagttttcatgttcttttaattaagcaaaatttaaataaaacctttgggtggaggcgggacttaagggctgaggattgagcccagggtctcacttagatacgcctcccagcccctgaaacatttttaaaactcagcaaataaggtaccagattccacatccagcataaattttccaaagacaactaatccatgctgaagactatgttttaattatttattggaagatggcttctttaaattttcttaaagtcttttaaaatttgctataatatttcacttaaagtctgaaatacattttacaacaggaagtctgtggtaatgaaattctttaggcaaaactttaaagcccgaggaacgtccatgttggacatttgtagagagaattgcctgagattgtctaactattcgtacgaaaaagagagaacaagcaagcactgaaaaatacaggaagtcggctggttcgctgcgtgtggagatctattctttccttaggccagggagaggaaagattacagtcctttttgtttcagaattcctttagaactctccagcgcttggcgctgatggtggatggagatcgttatgcgtgttttggttcctcagaggttttgagtgcacacgggagtgcctgcacaataaagccctaactcctcggtcaaaactatacatttaagccttgaaaggcagttttgggagccaagtgttatttaagggggaggcgtagtatcacttcagatataccaaaggtcttataagtttgcaaacatgggaaagaatctgaaaccaatttaaaaaatctttcaaatcccaagcccaaggcgacaagcgtcttattctaaatatactatcgaattcagagtagcatgtattaacttaaaccaataaaactcacattagctgttctctcagacccatgtaaaataagacggtggccaggattgtctaggggctggggcaggccgagttggaaggacttgggcacaaaggggaggctgcaacagtcttttgctgcaattcgagaacactaggcaattctgtctaatttccctacattctaatacagcaacacatttattttttttacgtccaaggtggccaacataaacaaaacccaaatatccaaatttggattcggccacactaaccgcccctacaggttccaaagcgcccagggtgagccgcttcgcagctgggttcgcaccctaaccctgcagacacccgcagggtccatgatctgcaggtctctagctcagagtcggcctcgccctgatctaatcgcttccccaggaagagaaagacaatacaaagagggagtaaaaaaagaaagaaaaggcgccacgacggcccgaaacgtgtcctggatcccagccagaggcctctcggctggagagcgagcgagcgagccagcgaccgcacccagggcctgccggccgacaagcgggcacctcctcccaggctggcggatgcgggccacgcccgccactttgtgcccccagggcccttgcactccgcccttccggacgctcgggaatgcaagggcgcaggcgacacctccacccccacccccgcccgcccccgccgccatcttgttgttttcttacattcctccacctacccccacccccgctgccacgtggcacgcggctacggaagagaaggccgcaccctagcttccggccagaccggttctagccggccgcgggatccagacgcggggctgccccctggtggccagtcttggcgctgcggccacgccttgcctcctccgccatttcctgcgcggcgcgaggcacgtcctcacgccgccgccgccatcccgcgaggacgcgggccaccagcgggaggctgacccgggtgaggcgcgggaacgcccttcattccgagtcgggagccgaggcttagttagcacgagaccgctgcagcgtgacacgcacttggtttaaaaactaattcgtgtcgctcttccttctgcccgcggcggcctgtcctgcattttctgttttttttccgtttgtcttcctggctgcgccgtcaccctttagcgtttcattccaggctaatgttggataagtatgtgctgtggagacccgtgtgtccacttagtcatcatagatgcctccaggagttgtcacactccatagcacagaccaccatgctaggggctgaggatcctacactggaatctatgacatttgcaaacgttctcctttactttgagggagctcataggaaagaaaagtgaattcacatcgaggtctccccacacctatgtcaattaaaagctttatgttttttttgtaaatgaaatgaatgggacctgacagtagttaactgtgcagctccaagggggatttgagacataccgaagtccctttatgtacctggcagcccttctattaggaggagcagggaaagtctttaatgagtgctaaccctcaagccaggcaatttgtgtgctttttggataagtaccctacccatcacattcactgctttgtgggaaaagaaaccaattcaactgagtttcccatgtgcaatgctagagtgtatgcaatgttcacactattatattgaaggactttagaattaacaaagaaataactaagaagaaaaacaatcctctcaccctaagaacagggagacctgacttaaaacctaaccaaggtcacaatgacccaagcccctggaatttcttagctggcagatataactcccttacaaggccacaagacaacctaactgaataccaagaattcctagagggccaccctgccctagggtcatgaagatagaaacagactatcccactgagccaggagaccatccggccccaaagataagagatctccaaaggatctgtgactctggtcacgtacccaaacccctaaaatcctatggttttttctcttataaaaggagcctgctttagaggaacagggcttcttctttgtctgtcggactgggaagcccgtttgcgcaaacgtcccataataaacttacctcttgttttttgcatcagctggactggacattgagtgtttttggggggatcgtccaatttgtagagactcctcggtccgagggtctttcatttggaggtcccaccgagatcaggacaccccccagactcaatttcacagccagttggaggtaagacagtctatgtatttgtgtgtatgtgtctctgtgtctctgtgtctttgtgtcttgtaaggagttttggttcggcccagacgagagtctgagggccatttggaggagggagaagagacgaagtctcatttctctggggaagcggccgccccagactttgcttccctcccgctttgtaacttgttttttggttgattagcttttggttcggcccagacgagagtctgagggccatttggaggagggagaagagacgaagtctcatttctctggggaagcggccgccccggactttgcttccctcccgctttgtaagcttttggttcggcccagacgagagtctgagggccatttggaggagggagaagagacgaagtctcatttctctggggaagcggccgccccggacttggcctccctcccgctttgtaacttgtttggcgccaactgtctaccgcggtccgtcctgtctgttgtatttcgttccactgtgcttgttattcgtgtcaatctctgcttcttcccatgggtcagcaactaactacccccttaagtttgactttaggtcactggcaggatgttttgagccgagcacgcaaggaatcagtagagatccggaagaaaaagtggcggactctctgtttctcggaatggcctgctctcaatacaggctggccgagagacggtacctttgacctcactactatcttacaggtcaaaactcgtgttttccagccaggaccttggggctaccccgaccaggtaccctatattgtcacctgggagagcctgagccgtgatcctcctccctgggtcaggcccttcctcccaccccgtctttcgggcccctgcccgacacctctgcctttgcctgctccacttatccctactccttctgcacccccttcgacttcttccctgctccccttgacagagccccgatctcccaaccctaggcccaaagcccctgccgtcttgcccaatacacaggaggatctcctcctcctggactcccctcctccttaccctaatgctgagcaggcagcatcccagctcccagcagctgaccagagccccccaccaccgagctctactaccggagaccctggggacccgtcgccaccgtccacccgacttcgatctcgaagagacaaaacactggaggggcctgacagctctggaatctcccaggcttttcccctccggtcgatgggggaggggcgttaccaatactggcctttctcctctgcggacctttataattggaaggcacataacccccccttttcacaggacccccaggccttgacaggtcttattgaatctatcctcatcacccaccagcccacctgggatgattgtcaacagttattaggaattctcctcacaaccgaggagagacaacgggtactcctagaagcccggaagaacgtcccggggccagatggcagacccacccagctcccaaatgaaatagatgaagtctttcccttgatcagaccgacagactgggacatcaacacagcagccggtagggagcgtcaccgtctttatcgccagactctgttggcgggtctcaaaggggcaggaaggcgccccacaaatttggccaaggtacgtgcggtagttcagggcttggaagagacccccgcagggtttctagagcgtttgatggaagcctacagaatgtatacaccctttgacccccaggctcaggatagggaagcagatataatcatgtcattcattggacaatcggcgcctgacatacgcacaaagctacagcgccttgaggggctacaggggtacacccttcgagacttagtaaaggaagcagaaaagattttcaataagagagagactcccgaagaaaaggaagaaagattacgaaagttacaggaggacagggagaatgtaagagacaaaaagcaaaaccaagagctagctaaaattttggccactgtagttcaaggatcaaaacatagaccaggtcagacagggaacctgggagacaaaaggagaacaagagtggagagaaaccagtgtgcttattgcaaggaaaaaggacattgggtcaaacattgcccgaagaatccaaggcggaagcccacccccattctccctctggaaaagggagattaggacagtcagggccaggtgcctccccctgagccccgggtaactcttaacgtcggggggcaaccagtaactttcttggtagacacgggagctcagcactcagtcctgactcagacccagggacccctgagcacccggacagcctgggtccagggtgccaccggaggaaagctacatcgatggacaactgaacgtaaggtccacctgagcactggacacgtgactcactccttcttgctggtgcccgaatgtccttaccccttattagggagagacctcctctctaaagtgggagcccacattcacttccatcagaagggtgccaccatcacaggagaggggggacaacccctccaggtactgaccttaaggctcgaggataaatatagacttctagaggatcccttacccccctcgccaaccatggagtctagctggttagaaaaatatccccaagcctgggcagaaacagcaggcatggggttggcaaaaaaacagcctcctttaattatcaacctcaagccctcagccactccagcggccattaaacaatatcctttgagccaagaggcccgggaaggaatcaggccacacattaatagactattacaacaaggcatccttaggccctgtcacagcccttggaataccccccttctccccataaagaaaccaggtacgggagagtacaggcccgttcaagaccttcgggaggtcaaccggagaactgaggacatccatccgacagtgcccaatccttataacttgctgagcatgttgcctccgagccacatctggtacacggtgctagatcttaaggatgcattcttttgcctcagactgagtccccagagccagcccatgttcgcgtttgaatggaaggacccggagactgggttttctggccagctcacttggacacggctcccccaggggttcaaaaactctccaactctcttcgatgaggccttacaccaagacctagcagacttccggatccataaccctaacctgatcctgcttcaatacgtagatgacctcctcctggcagcggaatctgaaaaagactgcctccaaggtaccggggccttactgcaaaagctgggggaattggggtacagagcttcagcaaagaaagctcaactttgcagggaacaggtcacctacttaggataccggctccagggtggccagagatggctaacagagagccgtaagcaagctgtagccctgattccagcacccaagagctcccgggaagttcgggaattcctgggcagcgcagggttctgccgtctctggatcccaggtttcgcggagctggcagccccactgtatcctctgactaaggctaacacccctttttcatggacagaggagcatcagaaggcctttgatggcatcaaaaaggccttactgtctgcccctgcactaagcctccccaacataaacaagcctttcaccctttatgtggacgaaaaggctgggatggcaaaaggggtcttaacacaacagctcggaccctggaaaagacctgtagcatacttctctaagaaattggacaatgtggccatgggctggcccccctgcctccggatggtggctgctgtggcggttctgaccaaggacgcggacagattgactctgggtcagcaactcacagtgatagccccacatgcgattgaggcagtgatccgacaaccccccgatcgatggctttcgaatgcacgaatgacacattaccaggctctgctcctcaacccagacagactgcgattcggggcagcaacatccttaaacccagccaccctccttccggatgcggatgccgaaactgctctgccccatgactgccgcctaatcctggccgagacctgcggagcccgagaagacctgatggatcaaccactacaaggagccgagcatacctggttcacagacgggagcagttttctgcaagacggtatacgaaaggcaggggcggcggtggtggacgggcagactacaatatgggccagtgccttgccgccaggaacctcagcccagagagcagagctgattgctctgacccaagcactcaaaatggctgaaggtcgtagagtcaatatctatacagacagccgctatgccttcgctacagcccatgtacatggagaaatttatcggagacggggacttttaacttcagcaggaaaagacattaaaaataagactgagatcctagagctcttgcaggctctttttctgccacgaagattgagcattatacactgccccggacaccagaagggaaatgacccagtggctagagggaaccgaatggccgatgaagaggccagaaaagcagccttggggccacaagtcctctccctaaagacctctgatccaacctcatgccaaggattcgaatacacggacagcgacttagaaacagttcaaaatctgggggccaactatgatcaggaggcaaacgtctggcgctaccaaggaaaaattctgttgccacagggggctgctaaggaacttttgtcacaactacatcgatggacccacctcgggcacaaaaagctaaaagcccttctacaacgagaagaacaaacctactatatccacaacctcaatgctctcatccaacagatcactagcacctgtaccccctgtgcaaaggtgaatacaggacggttcaagttgcctgagggaaccagggtaagaggagaacgtccagggaccaactgggaagtggatttcaccgaaatcagacccggtagctttgggaataggtacctcctggtttttatagacaccttttcaggatggactgaggcttttcctactaagcatgagaccgcccaggtggtggtcaagaagattcttaaagagatctttccgaggttcggactgcctaaggtaatagggtccgacaacggacctgcctttgtctcccaggtaagtcagatggtggccaaaacattggggatcaattggaaattacattgtgcatatcgcccccaaagttcaggtcaggtagaacgggcaaaccgaacaattaaagagaccctgaccaaattagccttagagactggcgctaaggactgggtacagctcctgcccatggccctatttagggttcggaataccccctcggtacatgggctcacaccttttgagattttgttcggaggacccccacctattatggatgtgttccctgctgatcctaaccactccgttaaccccccatcccttcaggcccgactacgagcactccagattattcaaaaccagatctggaaaccattggctgcagtgtaccaggccggaaaccctgctgtacctcaccccttccagattggggactccgtatacatcagacgccaccagtctaagactcttgagcctcgctggaaaggcccctacaccgtgcttctgaccacccccacggcactaaaggtggacgggatcgcagcatgggtccacgcctcacatgccaagaaggccaacaccagcgagaattgggtgacgaacgagaccccaaaatggaaactacagcgcactcaaaacccactcaagataagacttttacgcgatgtttaatcatttcactatgctcgatacttttccatttctcagccctagttaaaggagccccacatgccccccagcagctaacttggcaggtgatatcccagacagaggaggtcgtctggtcagtcactagcctttagccacccggtacctggtggcctacactcacccctgatttttgccatttagccgcaggtctagaaacctgggatatcctgactataggagcagataagatgacaacctacaggggtagaggaaaccgccgatttggctgtagtaataagataacccagtgtgagctagccagacttgatttctatgtatgtccccgggaggggcagccccggggctctgggtgcgggggatatactgagtatttctgtgctaagtggggttgcgaaactaccggggatgcttattggaaacccagctcctcctgggatctgataactgtcaagcggaactactcgcaacccctccaatgtagtccccatagttttggggactgggagcaaacttgcaaaggaactctttgcctccctttaagaattaacttcactaaccgagggaaggcaacctatacggcctggctaaccgggaaaacttggggtttaagatggcacatgacaggaacagatagaggagtcatattcaaggtccggttgctgatacagagccctactccacggacgatagggcctaatccagtccttagaaacctaggaaccccaaagctcccccaacctagagctctggctcgggccattaccccggttccaaccgccaccagccattccctcgccactgcctcccaagtagaaaatattccatctactagacagcgaatttttaatctggtcaggggagccttctctgcccttaaccaaaccaggccagagatgactaacccttgctggctatgccttgcttctacacccccctactatgaaggcatagccaccctagggacgtttaatagcaccactgattcatctcagtgtgattggggagcacaccatagactaactcttactcaagtctcaggaatgggtacctgcctagggcctgttccccagtctcaccaagacctttgtaaccataccctcccacagcctgtaaaacccacctacctgatacctagtccaggcctatggtgggcctgcaatactgggctcaccccttgcatacatacaggagccctcaaccaaaccaaagacttctgtgtgctggtccaactgatgccccgtgtattgtaccatccagcgggctatctggaggacatgtatggttctcatcggacccgatatcgaagggagccagtatccataaccctagctgttctgttagggattggggtcaccgcagggattggtacagggaccacggccctggtccaaggaccgcaacagtacagcgagctcaaaaatgccatgacggcagatttaaaggaattagaaaagtcaataaccaggctggaggaatcactggcctccctggcagaggtagccctccaaaaccggagaggactagacctattgtttctaaaagaaggaggactctgcgttgccctcagagaggaatgctgcttctatgtaaaccactcaggagtaattagggactccatgacaaaactcagagagagattagctaaaagacagagggaggccgaagctcaacaaggatggttcgaaggatggttcaataagaccccatggttgactaccctaatttccaccctggtaggacccctgttcattctcctcttactcctgacacttggcccttgtctcctcactaggctcctacagtttatacgtgaaaggttatccatcactcaagccctcgtcctaactcaacagtaccacgctgtgccaagcgctgaggtccctgatgtttcttctaacctaaatctgtgagtttttttaggactcaagaacgcatttaagtatcagccactgactacagcctgctcctaaggaccatgaggcccagactataaaccagtcgtgctgctgcggacactcccgactcttcaaccagctgcctctccactgcctaaatccccttttcttttgactaacatttcattttttagacccctaacgacgccccaaagtcagcaggaagtagtatgagacagacgccgcccatttacctggtcaaaatgctatataaaattgtccactaataacccaagaatgggttacctaaaaaaaaaaaaagggggaaatgaaggactttagaattaacaaagaaataactaagaagaaaaacaatcctctcaccctaagaacagggagacctgacttaaaacctaaccaaggtcacaatgacccaagcccctggaatttcttagctggcagatataactcccttacaaggccacaagacaacctaactgaataccaagaattcctagagggccaccctgccctagggtcatgaagatagaaacagactatcccactgagccaggagaccatccggccccaaagataagagatctccaaaggatctgtgactctggtcacgtacccaaacccctaaaatcctatggttttttctcttataaaaggagcctgctttagaggaacagggcttcttctttgtctgtcggactgggaagcccgtttgcgcaaacgtcccataataaacttacctcttgttttttgcatcagctggactggacattgagtgtttttggggggatcgtccaatttgtagagactcctcggtccgagggtctttcaatatgtacattttgcttgcattgtatatacacacaacctctgcaagagtatctgtttcaacttggtttacctccagtagaggagataggttgctagggggaaccgggaagatttttttttttttgaagcaattttccaagttgaactacaagagtatttattccaaagaaaataaagagttatattcagaacagtgttaaagcttaaactagaatcaagtccaaatggctccagattccatgtcttctgttaactacacatgaaaatctattttaaacataaaatgttactagagcttgtagtattgtcagcactgatgaaatttagctcctcatttaacttctgaacagtaaccacctttaaaattgtgctaattgtaacagaccatcgtatgataaatacaatgaaaaccaaactttttaagatcaggcctttcgagctggagagatggctcagaagagcgccaatttttcttccagaggtcctgagttcaattcaaagcaaccacatggtggctcacaaccatccattatgagagctggtgccctcttctggtgtgcagaatgttgtatgcataataaataaaatcttaaaaaaaaaaaagatcaggccttactcccacaaccccttgttttctgatacagggtcttatatggtcctggctcgcctcaaactccaactctgtagtagtggatgatcgagaacttctgacctcttctgtttacctcccaaatgccggatcacagccagtgtcatctcacctagcctttgttttggcagtttctgtgttttacataagggtctcactctataatgcagactggcctgggactcaactgtgttgcccaggcctgaccttaatctctaggtagttctcgtgtatcaccctcaaaagtgcttggattacaagtgtgagccatcatgcccaatttagaaaataaagttggttagcactgtcacttacagagccctcagatcccttctcggatgtccatgtggcatttgtccatcaaatatgaactgcctgtccttaccacatgttgtaacattcaggagcctgctccttgcttatattttttcccgagttgccaatcatagtgattttattgtctagttattttgagacaggatgtagcttggctggtgtggtgcttgattaacatgcttgaaggccaggatttaattcctggcaccgaataaaatcggattttcctgccacatgttgaggtgagggcaggatgatcaagagttcaaggccagcctcaactacatagtgagtttgaggccaggctgggccactgtaaagataggaaaggagacaaaccagatcttctatacagtgcaggctgagggtggcatccaaattggcagcctcctgtctcctccttgttaaatgtggaagtataggcacatgctatcactttttctgtttttttttttctttcttcttttttttttttttttttttgagacagggtttctcagctttggaggctgtcctggaactagctcttgtagaccagaccaggctggtctcgaactcacagagaactgcctgcctctgcctcctgagtgctgggattaaagccaagcagcaccaccaactcctgaccttttttttttttttttcttcattttttcacgggatttctctttgtagatctggaacttacaatgtagaccaggctggccttgaactcagagattcacctgtctccgcttcccaagtgctgggattaaaggcatctgtcaacagcacctggctctattttgctactcttcacaaggtgttgtaaaagcaatgcaaacctgtgtgtcttagaatatgttacttaccctctcattgattcaatgctgatctgtaaaaaaagaaagttaaaaacactcaccttgggctggagaaatggctaagcagtttaagagcactgactgcttttccagatgaacccaggttcaaatcccagcacccacatggaagctcacatgtctgtaacttcaagatctgacaccctcacccagacaaacatgccggcaaaacaccgatgcacataaaataatttttaaaaatattaaaaaaaagcacaactcgcctcacaggcttgtgagaatgagttgagttaatgtacatgtagatgtatttgaggattcaaccaatagtggatcaaaaataactgaaatgtgcctgaactcaacaagtacagatttttttcttgtcattttccctaagcaatatgatttaacagctacttacatacatttgcattatattaggtgcttataaataatttataaatgatgtaaggcttgtgggtgggtgtctgcaggttgcattttatattaggaacttgagcatcctgtgggtgtgtgtaaggaatatgtgcccaggaatgactgcaatctcaggacttgggaggtagaggcaggagcatcagaagttcaaggtcattcttaggtgcagagtaagtttaagactagcctaggatacttgaaacgtggtctcatcaagagacaaaaccaaacagactttcctggtatgattaaggtttttgggaccagctctgtgtcatcatcaatgtgtcttcatgtgatggtttgaatgcacatagaagagatggccgtgtgattgcagaggcagagactgaagcctctttaagtcacagaaagccaagtctggctgcaccagatgacacaaagggtgaaacacacctccccttgggacttcagaagtatgagcctaccatcctgattatactcatacaaggcagcccttctccctttatggcacagtgggctcccttaacctatgtttctgtttactactacagtttcacttacccaaggttaaccccagggtctctctctttttttttttttttaagattttatttatttattaagtagacaacattctgcttccatgtgtatccacccaccagaagagggcaccagatctcataacagatggctgtgagccaccatgtggttgctgggaattgaactcaggacctctggaggagcagccagtgttcttaacatctgaactatctctccagcctacccccccccaccctccaccccctgtctctctaagagcagcaaatttttttttttttttttttttgagatagggtttctctgtgtacctttggagactatcccggcactagctctgtagaccaggttggcctcgaactcacagatatctgcctgcctctatctcctgagtgctgggattaaaggcatgcaccaccagcttcggaagcagcaaatgctcttatcacctagtcaactctccagcacattactgtgtctgattgataaactgtatgagaggcatacacacacacatctgtattgggcttggtattgtatataatttcaggtatccatggaatatttcaggatgtattcctgatgaggagacctctttaaattatttatgcaacattccttaagttttcttttctattttgttgttttttctagtagaggcacagccctgtctgcagatgaatgcagtgtgcacaggagctgtgtgcaggtgttcccccaccccaccccccctccccgccccgccagacaccccagacagggtttctctgtgtagctttctagactaggctggcctc

SEQ ID NO: 13 - DNA, 16285 bp, synthetic construct
  source 1..16285: mol_type = other DNA; note = CHERV-3g allele B
cctcccaagtattgggattaaaagagtgtgccaccaccctctggcctctacacagtattttatagaatgttctgtgtccagtgtggtggactgagcctgcaatcccagcactagagaagcattagcagaaagatttcagtcagctcagctcaagactagcctagtttatttagggagctgcaggcctacaaggtcatcacaatgaggccttgtctcaaaataaacagaacgaacaaaacctccaatccaaaaacaataacaaaacaatttttgtacagaagtgctaacatccattttataagagcaaaaaaaaaaaaaaagtaaacaaagttggcatccattaataaaagaatggctaatagacccggcgttggtggcgcacgcccttgatcccagcacttgggaggcagaggcaggagaatttctgtgagtttgagaccagcctggtctacagagtgaataccagaataggctccaaagctattcagagaaactctgtctcgaaaaaccaaaaaaaggctaatagttaattatatttatctgctataatactatgtaaaagtcctgaagattaaaaaaattgtttttaatttttatggagaaaaggaacacgagtatgccacagcaagagtatggaggtcagagaataagtttatatagcaggctttctccttttcctccatgtgtgttggtgtttgaggcttgaactcgggtaatcaatcctcaggcttgcagtggcaagtggtttaccagctgtccctccctttaaaggcagaatttctatatgaagcccaggccgacctccaactcagattagtttctcctgccaccacctcccaggtgctgggacagtagggaaggcacgtgccatcaccattaagattcgtactcacggtaagaagatgtatattttacaagacagtacaaaacatcgactacaaagctgtatcatataaacaaccagacgatttgcctcacagttgttattttcgggggtggcatgctggatgatttttttttctttgtagttttcatgttcttttaattaagcaaaatttaaataaaacctttgggtggaggcgggacttaagggctgaggattgagcccagggtctcacttagatacgcctcccagcccctgaaacatttttaaaactcagcaaataaggtaccagattccacatccagcataaattttccaaagacaactaatccatgctgaagactatgttttaattatttattggaagatggcttctttaaattttcttaaagtcttttaaaatttgctataatatttcacttaaagtctgaaatacattttacaacaggaagtctgtggtaatgaaattctttaggcaaaactttaaagcccgaggaacgtccatgttggacatttgtagagagaattgcctgagattgtctaactattcgtacgaaaaagagagaacaagcaagcactgaaaaatacaggaagtcggctggttcgctgcgtgtggagatctattctttccttaggccagggagaggaaagattacagtcctttttgtttcagaattcctttagaactctccagcgcttggcgctgatggtggatggagatcgttatgcgtgttttggttcctcagaggttttgagtgcacacgggagtgcctgcacaataaagccctaactcctcggtcaaaactatacatttaagccttgaaaggcagttttgggagccaagtgttatttaagggggaggcgtagtatcacttcagatataccaaaggtcttataagtttgcaaacatgggaaagaatctgaaaccaatttaaaaaatctttcaaatcccaagcccaaggcgacaagcgtcttattctaaatatactatcgaattcagagtagcatgtattaacttaaaccaataaaactcacattagctgttctctcagacccatgtaaaataagacggtggccaggattgtctaggggctggggcaggccgagttggaaggacttgggcacaaaggggaggctgcaacagtcttttgctgcaattcgagaacactaggcaattctgtctaatttccctacattctaatacagcaacacatttattttttttacgtccaaggtggccaacataaacaaaacccaaatatccaaatttggattcggccacactaaccgcccctacaggttccaaagcgcccagggtgagccgcttcgcagctgggttcgcaccctaaccctgcagacacccgcagggtccatgatctgcaggtctctagctcagagtcggcctcgccctgatctaatcgcttccccaggaagagaaagacaatacaaagagggagtaaaaaaagaaagaaaaggcgccacgacggcccgaaacgtgtcctggatcccagccagaggcctctcggctggagagcgagcgagcgagccagcgaccgcacccagggcctgccggccgacaagcgggcacctcctcccaggctggcggatgcgggccacgcccgccactttgtgcccccagggcccttgcactccgcccttccggacgctcgggaatgcaagggcgcaggcgacacctccacccccacccccgcccgcccccgccgccatcttgttgttttcttacattcctccacctacccccacccccgctgccacgtggcacgcggctacggaagagaaggccgcaccctagcttccggccagaccggttctagccggccgcgggatccagacgcggggctgccccctggtggccagtcttggcgctgcggccacgccttgcctcctccgccatttcctgcgcggcgcgaggcacgtcctcacgccgccgccgccatcccgcgaggacgcgggccaccagcgggaggctgacccgggtgaggcgcgggaacgcccttcattccgagtcgggagccgaggcttagttagcacgagaccgctgcagcgtgacacgcacttggtttaaaaactaattcgtgtcgctcttccttctgcccgcggcggcctgtcctgcattttctgttttttttccgtttgtcttcctggctgcgccgtcaccctttagcgtttcattccaggctaatgttggataagtatgtgctgtggagacccgtgtgtccacttagtcatcatagatgcctccaggagttgtcacactccatagcacagaccaccatgctaggggctgaggatcctacactggaatctatgacatttgcaaacgttctcctttactttgagggagctcataggaaagaaaagtgaattcacatcgaggtctccccacacctatgtcaattaaaagctttatgttttttttgtaaatgaaatgaatgggacctgacagtagttaactgtgcagctccaagggggatttgagacataccgaagtccctttatgtacctggcagcccttctattaggaggagcagggaaagtctttaatgagtgctaaccctcaagccaggcaatttgtgtgctttttggataagtaccctacccatcacattcactgctttgtgggaaaagaaaccaattcaactgagtttcccatgtgcaatgctagagtgtatgcaatgttcacactattatattgaaggactttagaattaacaaagaaataactaagaagaaaaacaatcctctcaccctaagaacagggagacctgacttaaaacctaaccaaggtcacaatgacccaagcccctggaatttcttagctggcagatataactcccttacaaggccacaagacaacctaactgaataccaagaattcctagagggccaccctgccctagggtcatgaagatagaaacagactatcccactgagccaggagaccatccggccccaaagataagagatctccaaaggatctgtgactctggtcacgtacccaaacccctaaaatcctatggttttttctcttataaaaggagcctgctttagaggaacagggcttcttctttgtctgtcggactgggaagcccgtttgcgcaaacgtcccataataaacttacctcttgttttttgcatcagctggactggacattgagtgtttttggggggatcgtccaatttgtagagactcctcggtccgagggtctttcatttggaggtcccaccgagatcaggacaccccccagactcaatttcacagccagttggaggtaagacagtctatgtatttgtgtgtatgtgtctctgtgtctctgtgtctttgtgtcttgtaaggagttttggttcggcccagacgagagtctgagggccatttggaggagggagaagagacgaagtctcatttctctggggaagcggccgccccagactttgcttccctcccgctttgtaacttgttttttggttgattagcttttggttcggcccagacgagagtctgagggccatttggaggagggagaagagacgaagtctcatttctctggggaagcggccgccccggactttgcttccctcccgctttgtaagcttttggttcggcccagacgagagtctgagggccatttggaggagggagaagagacgaagtctcatttctctggggaagcggccgccccggacttggcctccctcccgctttgtaacttgtttggcgccaactgtctaccgcggtccgtcctgtctgttgtatttcgttccactgtgcttgttattcgtgtcaatctctgcttctccccatgggtcagcaactaactacccccttaagtttgactttaggtcactggcaggatgttttgagccgagcacgcaaggaatcagtagagatccggaagaaaaagtggcggactctctgtttctcggaatggcctgctctcaatacaggctggccgagagacggtacctttgacctcactactatcttacaggtcaaaactcgtgttttccagccaggaccttggggctaccccgaccaggtaccctatattgtcacctgggagagcctgagccgtgatcctcctccctgggtcaggcccttcctcccaccccgtctttcgggcccctgcccgacacctctgcctttgcctgctccacttatccctactccttctgcacccccttcgacttcttccctgctccccttgacagagccccgatctcccaaccctaggcccaaagcccctgccgtcttgcccaatacacaggaggatctcctcctcctggactcccctcctccttaccctaatgctgagcaggcagcatcccagctcccagcagctgaccagagccccccaccaccgagctctactaccggagaccctggggacccgtcgccaccgtccacccgacttcgatctcgaagagacaaaacactggaggggcctgacagctctggaatctcccaggcttttcccctccggtcgatgggggaggggcgttaccaatactggcctttctcctctgcggacctttataattggaaggcacataacccccccttttcacaggacccccaggccttgacaggtcttattgaatctatcctcatcacccaccagcccacctgggatgattgtcaacagttattaggaattctcctcacaaccgaggagagacaacgggtactcctagaagcccggaagaacgtcccggggccagatggcagacccacccagctcccaaatgaaatagatgaagtctttcccttgatcagaccgacagactgggacatcaacacagcagccggtagggagcgtcaccgtctttatcgccagactctgttggcgggtctcaaaggggcaggaaggcgccccacaaatttggccaaggtacgtgcggtagttcagggcttggaagagacccccgcagggtttctagagcgtttgatggaagcctacagaatgtatacaccctttgacccccaggctcaggatagggaagcagatataatcatgtcattcattggacaatcggcgcctgacatacgcacaaagctacagcgccttgaggggctacaggggtacacccttcgagacttagtaaaggaagcagaaaagattttcaataagagagagactcccgaagaaaaggaagaaagattacgaaagttacaggaggacagggagaatgtaagagacaaaaagcaaaaccaagagctagctaaaattttggccactgtagttcaaggatcaaaacatagaccaggtcagacagggaacctgggagacaaaaggagaacaagagtggagagaaaccagtgtgcttattgcaaggaaaaaggacattgggtcaaacattgcccgaagaatccaaggcggaagcccacccccattctccctctggaaaagggagattaggacagtcagggccaggtgcctccccctgagccccgggtaactcttaacgtcggggggcaaccagtaactttcttggtagacacgggagctcagcactcagtcctgactcagacccagggacccctgagcacccggacagcctgggtccagggtgccaccggaggaaagctacatcgatggacaactgaacgtaaggtccacctgagcactggacacgtgactcactccttcttgctggtgcccgaatgtccttaccccttattagggagagacctcctctctaaagtgggagcccacattcacttccatcagaagggtgccaccatcacaggagaggggggacaacccctccaggtactgaccttaaggctcgaggataaatatagacttctagaggatcccttacccccctcgccaaccatggagtctagctggttagaaaaatatccccaagcctgggcagaaacagcaggcatggggttggcaaaaaaacagcctcctttaattatcaacctcaagccctcagccactccagcggccattaaacaatatcctttgagccaagaggcccgggaaggaatcaggccacacattaatagactattacaacaaggcatccttaggccctgtcacagcccttggaataccccccttctccccataaagaaaccaggtacgggagagtacaggcccgttcaagaccttcgggaggtcaaccggagaactgaggacatccatccgacagtgcccaatccttataacttgctgagcatgttgcctccgagccacatctggtacacggtgctagatcttaaggatgcattcttttgcctcagactgagtccccagagccagcccatgttcgcgtttgaatggaaggacccggagactgggttttctggccagctcacttggacacggctcccccaggggttcaaaaactctccaactctcttcgatgaggccttacaccaagacctagcagacttccggatccataaccctaacctgatcctgcttcaatacgtagatgacctcctcctggcagcggaatctgaaaaagactgcctccaaggtaccggggccttactgcaaaagctgggggaattggggtacagagcttcagcaaagaaagctcaactttgcagggaacaggtcacctacttaggataccggctccagggtggccagagatggctaacagagagccgtaagcaagctgtagccctgattccagcacccaagagctcccgggaagttcgggaattcctgggcagcgcagggttctgccgtctctggatcccaggtttcgcggagctggcagccccactgtatcctctgactaaggctaacacccctttttcatggacagaggagcatcagaaggcctttgatggcatcaaaaaggccttactgtctgcccctgcactaagcctccccaacataaacaagcctttcaccctttatgtggacgaaaaggctgggatggcaaaaggggtcttaacacaacagctcggaccctggaaaagacctgtagcatacttctctaagaaattggacaatgtggccatgggctggcccccctgcctccggatggtggctgctgtggcggttctgaccaaggacgcggacagattgactctgggtcagcaactcacagtgatagccccacatgcgattgaggcagtgatccgacaaccccccgatcgatggctttcgaatgcacgaatgacacattaccaggctctgctcctcaacccagacagactgcgattcggggcagcaacatccttaaacccagccaccctccttccggatgcggatgccgaaactgctctgccccatgactgccgcctaatcctggccgagacctgcggagcccgagaagacctgatggatcaaccactacaaggagccgagcatacctggttcacagacgggagcagttttctgcaagacggtatacgaaaggcaggggcggcggtggtggacgggcagactacaatatgggccagtgccttgccgccaggaacctcagcccagagagcagagctgattgctctgacccaagcactcaaaatggctgaaggtcgtagagtcaatatctatacagacagccgctatgccttcgctacagcccatgtacatggagaaatttatcggagacggggacttttaacttcagcaggaaaagacattaaaaataagactgagatcctagagctcttgcaggctctttttctgccacgaagattgagcattatacactgccccggacaccagaagggaaatgacccagtggctagagggaaccgaatggccgatgaagaggccagaaaagcagccttggggccacaagtcctctccctaaagacctctgatccaacctcatgccaaggattcgaatacacggacagcgacttagaaacagttcaaaatctgggggccaactatgatcaggaggcaaacgtctggcgctaccaaggaaaaattctgttgccacagggggctgctaaggaacttttgtcacaactacatcgatggacccacctcgggcacaaaaagctaaaagcccttctacaacgagaagaacaaacctactatatccacaacctcaatgctctcatccaacagatcactagcacctgtaccccctgtgcaaaggtgaatacaggacggttcaagttgcctgagggaaccagggtaagaggagaacgtccagggaccaactgggaagtggatttcaccgaaatcagacccggtagctttgggaataggtacctcctggtttttatagacaccttttcaggatggactgaggcttttcctactaagcatgagaccgcccaggtggtggtcaagaagattcttaaagagatctttccgaggttcggactgcctaaggtaatagggtccgacaacggacctgcctttgtctcccaggtaagtcagatggtggccaaaacattggggatcaattggaaattacattgtgcatatcgcccccaaagttcaggtcaggtagaacgggcaaaccgaacaattaaagagaccctgaccaaattagccttagagactggcgctaaggactgggtacagctcctgcccatggccctatttagggttcggaataccccctcggtacatgggctcacaccttttgagattttgttcggaggacccccacctattatggatgtgttccctgctgatcctaaccactccgttaaccccccatcccttcaggcccgactacgagcactccagattattcaaaaccagatctggaaaccattggctgcagtgtaccaggccggaaaccctgctgtacctcaccccttccagattggggactccgtatacatcagacgccaccagtctaagactcttgagcctcgctggaaaggcccctacaccgtgcttctgaccacccccacggcactaaaggtggacgggatcgcagcatgggtccacgcctcacatgccaagaaggccaacaccagcgagaattgggtgacgaacgagaccccaaaatggaaactacagcgcactcaaaacccactcaagataagacttttacgcgatgtttaatcatttcactatgctcgatacttttccatttctcagccctagttaaaggagccccacatgccccccagcagctaacttggcaggtgatatcccagacagaggaggtcgtctggtcagtcactagccttcagccacccggtacctggtggcctacactcacccctgatttttgccatttagccgcaggtctagaaacctgggatatcctgactataggagcagataagatgacaacctacaggggtagaggaaaccgccgatttggctgtagtaataagataacccagtgtgagctagccagacttgatttctatgtatgtccccgggaggggcagccccggggctctgggtgcgggggatatactgagtatttctgtgctaagtggggttgcgaaactaccggggatgcttattggaaacccagctcctcctgggatctgataactgtcaagcggaactactcgcaacccctccaatgtagtccccatagttttggggactgggagcaaacttgcaaaggaactctttgcctccctttaagaattaacttcactaaccgagggaaggcaacctatacggcctagctaaccgggaaaacttggggtttaagatggcacatgacaggaacagatagaggagtcatattcaaggtccggttgctgatacagagccctactccacggacgatagggcctaatccagtccttagaaacctaggaaccccaaagctcccccaacctagagctctggctcgggccattaccccggttccaaccgccaccagccattccctcgccactgcctcccaagtagaaaatattccatctactagacagcgaatttttaatctggtcaggggagccttctctgcccttaaccaaaccaggccagagatgactaacccttgctggctatgccttgcttctacacccccctactatgaaggcatagccaccctagggacgtttaatagcaccactgattcatctcagtgtgattggggagcacaccatagactaactcttactcaagtctcaggaatgggtacctgcttagggcctgttccccagtctcaccaagacctttgtaaccataccctcccacagcctgtaaaacccacctacctgatacctagtccaggcctatggtgggcctgcaatactgggctcaccccttgcatacatacaggagccctcaaccaaaccaaagacttctgtgtgctggtccaactgatgccccgtgtattgtaccatccagcgggctatctggaggacatgtatggttctcatcggacccgatatcgaagggagccagtatccataaccctagctgttctgttagggattggggtcaccgcagggattggtacagggaccacggccctggtccaaggaccgcaacagtacagcgagctcaaaaatgccatgacggcagatttaaaggaattagaaaagtcaataaccaggctggaggaatcactggcctccctggcagaggtagccctccaaaaccggagaggactagacctattgtttctaaaagaaggaggactctgcgttgccctcagagaggaatgctgcttctatgtaaaccactcaggagtaattagggactccatgacaaaactcagagagagattagctaaaagacagagggaggccgaagctcaacaaggatggttcgaaggatggttcaataagaccccatggttgactaccctaatttccaccctggtaggacccctgttcattctcctcttactcctgacacttggcccttgtctcctcactaggctcctacagtttatacgtgaaaggttatccatcactcaagccctcgtcctaactcaacagtaccacgctgtgccaagcgctgaggtccctgatgtttcttctaacctaaatctgtgagtttttttaggactcaagaacgcatttaagtatcagccactgactacagcctgctcctaaggaccatgaggcccagactataaaccagtcgtgctgctgcggacactcccgactcttcaaccagctgcctctccactgcctaaatccccttttcttttgactaacatttcattttttagacccctaacgacgccccaaagtcagcaggaagtagtatgagacagacgccgcccatttacctggtcaaaatgctatataaaattgtccactaataacccaagaatgggttacctaaaaaaaaaaaaagggggaaatgaaggactttagaattaacaaagaaataactaagaagaaaaacaatcctctcaccctaagaacagggagacctgacttaaaacctaaccaaggtcacaatgacccaagcccctggaatttcttagctggcagatataactcccttacaaggccacaagacaacctaactgaataccaagaattcctagagggccaccctgccctagggtcatgaagatagaaacagactatcccactgagccaggagaccatccggccccaaagataagagatctccaaaggatctgtgactctggtcacgtacccaaacccctaaaatcctatggttttttctcttataaaaggagcctgctttagaggaacagggcttcttctttgtctgtcggactgggaagcccgtttgcgcaaacgtcccataataaacttacctcttgttttttgcatcagctggactggacattgagtgtttttggggggatcgtccaatttgtagagactcctcggtccgagggtctttcaatatgtacattttgcttgcattgtatatacacacaacctctgcaagagtatctgtttcaacttggtttacctccagtagaggagataggttgctagggggaaccgggaagatttttttttttttgaagcaattttccaagttgaactacaagagtatttattccaaagaaaataaagagttatattcagaacagtgttaaagcttaaactagaatcaagtccaaatggctccagattccatgtcttctgttaactacacatgaaaatctattttaaacataaaatgttactagagcttgtagtattgtcagcactgatgaaatttagctcctcatttaacttctgaacagtaaccacctttaaaattgtgctaattgtaacagaccatcgtatgataaatacaatgaaaaccaaactttttaagatcaggcctttcgagctggagagatggctcagaagagcgccaatttttcttccagaggtcctgagttcaattcaaagcaaccacatggtggctcacaaccatccattatgagagctggtgccctcttctggtgtgcagaatgttgtatgcataataaataaaatcttaaaaaaaaaaaagatcaggccttactcccacaaccccttgttttctgatacagggtcttatatggtcctggctcgcctcaaactccaactctgtagtagtggatgatcgagaacttctgacctcttctgtttacctcccaaatgccggatcacagccagtgtcatctcacctagcctttgttttggcagtttctgtgttttacataagggtctcactctataatgcagactggcctgggactcaactgtgttgcccaggcctgaccttaatctctaggtagttctcgtgtatcaccctcaaaagtgcttggattacaagtgtgagccatcatgcccaatttagaaaataaagttggttagcactgtcacttacagagccctcagatcccttctcggatgtccatgtggcatttgtccatcaaatatgaactgcctgtccttaccacatgttgtaacattcaggagcctgctccttgcttatattttttcccgagttgccaatcatagtgattttattgtctagttattttgagacaggatgtagcttggctggtgtggtgcttgattaacatgcttgaaggccaggatttaattcctggcaccgaataaaatcggattttcctgccacatgttgaggtgagggcaggatgatcaagagttcaaggccagcctcaactacatagtgagtttgaggccaggctgggccactgtaaagataggaaaggagacaaaccagatcttctatacagtgcaggctgagggtggcatccaaattggcagcctcctgtctcctccttgttaaatgtggaagtataggcacatgctatcactttttctgtttttttttttctttcttcttttttttttttttttttttgagacagggtttctcagctttggaggctgtcctggaactagctcttgtagaccagaccaggctggtctcgaactcacagagaactgcctgcctctgcctcctgagtgctgggattaaagccaagcagcaccaccaactcctgaccttttttttttttttttcttcattttttcacgggatttctctttgtagatctggaacttacaatgtagaccaggctggccttgaactcagagattcacctgtctccgcttcccaagtgctgggattaaaggcatctgtcaacagcacctggctctattttgctactcttcacaaggtgttgtaaaagcaatgcaaacctgtgtgtcttagaatatgttacttaccctctcattgattcaatgctgatctgtaaaaaaagaaagttaaaaacactcaccttgggctggagaaatggctaagcagtttaagagcactgactgcttttccagatgaacccaggttcaaatcccagcacccacatggaagctcacatgtctgtaacttcaagatctgacaccctcacccagacaaacatgccggcaaaacaccgatgcacataaaataatttttaaaaatattaaaaaaaagcacaactcgcctcacaggcttgtgagaatgagttgagttaatgtacatgtagatgtatttgaggattcaaccaatagtggatcaaaaataactgaaatgtgcctgaactcaacaagtacagatttttttcttgtcattttccctaagcaatatgatttaacagctacttacatacatttgcattatattaggtgcttataaataatttataaatgatgtaaggcttgtgggtgggtgtctgcaggttgcattttatattaggaacttgagcatcctgtgggtgtgtgtaaggaatatgtgcccaggaatgactgcaatctcaggacttgggaggtagaggcaggagcatcagaagttcaaggtcattcttaggtgcagagtaagtttaagactagcctaggatacttgaaacgtggtctcatcaagagacaaaaccaaacagactttcctggtatgattaaggtttttgggaccagctctgtgtcatcatcaatgtgtcttcatgtgatggtttgaatgcacatagaagagatggccgtgtgattgcagaggcagagactgaagcctctttaagtcacagaaagccaagtctggctgcaccagatgacacaaagggtgaaacacacctccccttgggacttcagaagtatgagcctaccatcctgattatactcatacaaggcagcccttctccctttatggcacagtgggctcccttaacctatgtttctgtttactactacagtttcacttacccaaggttaaccccagggtctctctctttttttttttttttaagattttatttatttattaagtagacaacattctgcttccatgtgtatccacccaccagaagagggcaccagatctcataacagatggctgtgagccaccatgtggttgctgggaattgaactcaggacctctggaggagcagccagtgttcttaacatctgaactatctctccagcctacccccccccaccctccaccccctgtctctctaagagcagcaaatttttttttttttttttttttgagatagggtttctctgtgtacctttggagactatcccggcactagctctgtagaccaggttggcctcgaactcacagatatctgcctgcctctatctcctgagtgctgggattaaaggcatgcaccaccagcttcggaagcagcaaatgctcttatcacctagtcaactctccagcacattactgtgtctgattgataaactgtatgagaggcatacacacacacatctgtattgggcttggtattgtatataatttcaggtatccatggaatatttcaggatgtattcctgatgaggagacctctttaaattatttatgcaacattccttaagttttcttttctattttgttgttttttctagtagaggcacagccctgtctgcagatgaatgcagtgtgcacaggagctgtgtgcaggtgttcccccaccccaccccccctccccgccccgccagacaccccagacagggtttctctgtgtagctttctagactaggctggcctc

SEQ ID NO: 14 - DNA, 12026 bp, synthetic construct
  source 1..12026: mol_type = other DNA
  variation 11256..11355: note = n=a or c or g or t/u
tcagggccaagtgacttctcccatcccctccttccagaattgcaaaaaaagcaaagcacaaggggagccttccaagcctcatttcaatactgcacctttccaagtcatttttagtgacctaaacaatgactacctgaagtaatttgagcaagcaactccaccgttgggccagaaaagccagtttcaattctttggagaaataacaaacccctcagcatttggcttcttagttttatttgcttgtgtattcaacatctaaacgtgtgtgtgtgtgtgtgtgtgtgtgtgtgtgtgtgtgtgtgtgtgtgtgtgtgtgtgtgtgtgtgtgtgtgtgtgtgtgcctacagcaagcaaactcaccagatgcatccccaggacacccaaatatgaagagtacaagaccgcagtagcctggccagtgcacacaatggaagtgacagctttcagcccctccagccctgatccctggattccaactccctactacctcctcccagcacctcaggagtggggaggaagtgtccaagagagccgaacattctccctgttcctccctgctcctcccaggcctttctgggaaagcctggggacagaactgcccacctcctgacagcttgtaaagtgaagagtcagctttgggcttttgaggaaggactggaagtgcccggccactcccatccccggatccaggatgatgaccctaagggcagagcttcctccatcttctagaagaatatcgaaaccaggcagagttggaaaaggaagggaagggaagcagccaggtgtgtgacaacctcatcttttcaccttcctcggtatttgtatctagtttctgtttcactgctgccacatataagaatctgtgactgtgcctatttcttaatgaaattccgagggcagcacatatgattagtgacaggcttttgtaagccatctgataagacaacactcgaaaaacattaggctttagaacttaatccattttaaataaagatatttgtgctttgtttgtagatttatgtctttagaggtgtatttactttatggtctgttacacctaaaaaaaaaaaatcaactttcttttcaagaaggtaggtctgctcaggaaaaaaagattgtactcctaagctgttttttacatatatacatacttttataactcctttctcaaatagtttcttttacaaagagtgtgcttatttctaattatctccatactgcttaatcactgggacccaaagtaagctactaagatgaaaaattctgaggcaatacaaaccaaaatgctaagttatcaatcacaactcatttctatctttttttaaaaaaaatcctaattattaacatttacaaaggcaagggagaaaagtgctggcggaggcaccttccaactccaactccaacctctgacagaatcgagctggttaaaaggctttggaattcttaaactcagtttagagagtttccccctgagaccttcaagaggtcaccgtgtaccaagagtaaccacggcatctggtcaaggcagaggaacctgcctcacagctgagtttaccaagctaaggtacacggtacagacagccacaagttcttcaactgaggactggctgaccgtctggtcacctacaatctccctcccaagatccacttcctcaaattatccctgcttgtgtttgagcatttacagactagttagggttactggcttcccgacccctgtgcgttctcaggctgtcgataagccctcaccgtctgctcagtctctgctaagctgctgcctaaagttccgtgagcaacttggaaagttgctataaaagcttgaaatagagacacattaaatgttttttggagcacatacagacccgcctaaaatgtaaacagaatacctgctgctggcccaggctcttagaaaatgaggaatgacggaatgggagcggtggaatggtcttcctacagataacaagggccatttcagtgagatgcttgccacctctgcctgcatcttggcgagttcaacagtgcagtaactttgttgtctgaagtcagtggtgatgacaggaggcatcccgttttaaaaagaagaaaacacaaccagaggaaatggagataaggtttctgaggaagttctccttccactggatggtcttttgctgttgctccaccttaaagcggcttccaagatgtttagaatttccctagatttatggtacttttcctttagtgaaaagacaataccttctcctcacaaaggttctctgtttgcacgcacgctaagaaaacaaaacaaaacaaccccccccccaacaaaaaactgcctaagggcatcctttgtcacctaagaatatggcacaagtctgccattttagagatgaaaaaaactaagactaaccataattaagactgggtttgggttaagggctcctaacagatcacagtagacaattaaagggccttttgaaggaatcatagcaagaggtaggcagggatgctcacacaatctggcagattgaattcactccccaaactcaattctttgctctaaaatgaatgtcaatcaaagggctgcactggaaactgttgggggaataaagctctactgctggaccagtgggaacagaacacatcttcctaccttgtcaaagaatggtcctaactccatcaggactcggcagccattcctgaaccgaggcaagggattccatttacagttcaaaactgagctaagtattattttcctgacattagaccttcagagtgattcacacacaggaactgtctctggagcaggagcctctgtttcacggaacctattaaattatctcttcagcaagttacccactagccaagtacacttacatgtaagtactattactttgcaagtatatgaagactctgctataattaatgataataaatgccactaacatgctattatgacctttttgtcattacagaatccaacatattctaaaaatataaatacttagtcttgaagatttatgatgggttctcattatataaatctctgtagagagctgcagaaaaccgcacccaaaagatggcgctggtttccgccttccgccagcccgacggcgagcgctctctgtggtaaacaactccaaatatggtagaggtcatgtatcctcttaattctgcttggagacaacctatcctggcgcgccacgtagggttaggtgattggtagatgtagactatatcaggccccgtctccctcggcctggggccgccgcctccattatacatttgtacaaaagcaaagaggttcccgattaaactgtgtttgaagaagattcctcggtgtggcgtctttcttgctggtcaagggtggacgccgcaagtggtggcccgtacggggaattcagaacttctcacagtcggggcggcgccggtaagttcccaaggtaagtggaactgtaaagtccgcggtgaatgcggagataggtctccggtaaaggagcaccaaggtcctcaggaaagaggagataggtctcagtaaaagagtaccaaagccctcggggaagaggcagtaaagtctccggaaaggagcaacattgttcgcgacaaaagcgaaccgaaagtaaaaacctcgcttctgctttaatttgcagagtgagagtaagttaatggaccccgctattatagtggtgatttggctgctttttaacatagcagtgtgggcttttgttttctggtggtgttatcctacttgcacaccttcggagcgtgctaattaagacaaaagcacaatgggatcgtcacaatcacatccaatttttctggctcttcaagagctacttcattctaacaatttaaggttaactaaagccacattacagaggttcctgagtgaatgcgacaccattgcaccctggtttgcagcctcgggcaatctcactgtggatagttgggataaattagggaaagacctggattttgcctgggagcaaggagcgttgaagccgagtgttcgcccggtttggcgcctggtgcgcagctgtctagaggacaaagggggaaataagaaagctatagcaaatggacaggctgcccttgaaatgctccaagaagaaaggtcagaacagtcagaaagtgagagaacaaaggagaaacagaaaagggataagaagcgagtctatccttctctaggaaggttgaggaaggaattaaaagaaccaggagaggattcagaatcagaggaggatatatgtgaggatgaggacatcatggaggaagaggaggaagagattattgagctcatggaaaaacattcattaaaagtatcagaaaaacagcgtcctaaaatggcgactgtaaagcaagggcaccgccctatcgctcctcccccctactgctcgaaagaggaagtaggaggtcctggttgctccaccttctgtccggaagtgtggcgtacggttcgcactgagtttcgggttactcgaccactggcttatccagtttttacagacggtaaccaacagagatatcatgaaccaattgactttaaaatagtcaaagctctggcagaatcggtacgcacctatggggtgacggcagcttttacaattgctcaggtagaggcgctcggtcgctactgtatgacacccagtgattggacaaatttggtaagagcttgcttatcaccaggacaatatttggattggagagcttttcaaattgagtttgccaatgatcaaggtgcgattaatcgtgcagctggtgatcaatattgggatgtggacatgcttcttggtcaaggacgttttgcacagcaacaaacaggatatcctcctcaagtgtatgatcagattaatcaaatagccattagggcttggaggtctctgcctaacaaaggtgaggtcagtggaaatcttacaaagatattacagggtcctatggaacccttttcagactttgtggcaagaatggtagaagctgcaggaagagtgtttggggatccagatgctgctatgcctttgatcaaacagctgatttatgaacagtgtacaaaagagtgcagagctgcaataactccatataagggtaaaggccttgaagtctggatgaaagtctgtagggagttagggggtccgctgactaatgctggactagcagctgctgtgttgcaattaactaagaaaggtggaggttcaggagcttgctttaaatgcggcaagcaagggcatttgaaaaagcaatgccccgagggaggaaacactaaagtcaataactttgctccgcgccctaagcaacctggcttatgtcctagatgtagaaaaggaaatcattgggctaaggattgtagatcagtaaaagacatcagtggacagcctcttgttcaggggtatggaggagcccgttcaaaaaacggacgacggggcccacgaccccagggcccacaaatatatggggccatggaggatcagaaccaggagcagagtcccgaaacctggccctctcttcgtcatccgagggaccgaggagagccactacaggctccgcggggctggacttacgctccaccaccagactcgtattaactcccagaatgggggtccagcttgttgacaccgattttaagggaccccttgagcctggcacagtaggtttgcttataggaagatcatctgcagcattgaaaggtttacgagtacatcctggagttatagatcctgattacatgggtgtagtaaagatcatggtagaatctcctagagggattacggccatttctcctggagacaggatagcacagttactgcttttgccaagcttgcatgacaagtttccagcacaagccagagagagaggagagggaaactttggctccactggatcaaacttaactttcctagctttagaccttgatcaacgtccaacccttgagttaatagtgaatggtaagaaaatcttaggcttactagattctggagctgataagagcatcatagccactaaagattggccctctggctggcctatacaggtttcttctcaaagtttacaaggtttaggctatgctaaggctcctgatatgagtgctagacaattgccttggaaagatcaggaagggcattcagggaccatgcaaccttatgtgttagacttaccaatttcattatggggaagagatttgttaaaggatatgggttttaaactcacaaatgaatactcagaaacatctcaaggtatcatgaaacgaatgggatacgtcccaggccgaggcctcgggaaacatctgcagggtcgtaccagtcctattattccacaaccgagaccaaagaatctaggtctgggtttttcctaggggccactgagggaggtattcctattacctggaaaacagaggagccggtatgggttcctcagtggccactttcctctgagaaactggaagctgctaagactctagtgcgggagcagctggatctggggcatataaaatcctctgtatctccatggaatactcctatttttgtcattaagaaaaaatctggtaaatggagactgcttcacgatcttagagctattaatcaacagatgcaaattatgggccctgtacaacgtggtcttccacttttaacttctttacctgcatcatggcctatcatctctatagatattaaagattgcttcttttccatacctttgtgtgccaaggattcagggcgttttgcgtttacgctgccctcttgtaatcatgaacaacctgatttaaggtatgaatggatagtgttgccacaggggatggccaatagtcctactatgtgtcagttgtttgtagcagaagcaattgctcctttgagagtggactttccaaagattagatgtgttcattatatggatgatattttattggctgccaaagatgataaaacgcttaataaggcatatacaaaattggtaaaattgcttgagatgcataatttagtcatagcctcagaaaaggtacaaaaggacactgttgttaactatctaggggctaagattctccctcatacaattattccacaaaagatagagattagaaaagataatttaaaaactcttaatgattttcaaaagttgttgggagatataaattggataagatgttatttaaaattaccaaattatgagttgaagccattgtataatattctcaatggtgattcagcattagattcacctaggcagttaactgctgaagccagagaagctttaaagaaagtggagacagaattacaagatgccagccttaaacggctaatagaaaatatggatattcttttgtgtgtgcttccaacattctcccagcctacagctttgctgtggcaagatggtccgttactatggatttattctaaatcctccccaggaaaaactattgaatactatcctgcagcggttgctgacttggctcaaaatgggatacagcaatgtattcaatattttgggaaactaccaattaagatcataatcccttatactgctcaacaagttaagatactttgtggaactgtggatgattgggcaattcttcaatgtggattttcaggagaaatagataatcattatccaaaacaccctctaatgtcattttttaaagaacatccagtcatttttcctaaaatgactgcagcagctcctattgctggagccgcaaatattttcactgatggatccaagacgggctgtggagcctacatgatagagcatcaggatccagtgcaatttcaatatcagcctggctccccccaaattattgaatgtaaaattgttcttgaagtgtttagaaattgcccgttctcctttaatctgatttctgattcggcatatgttgtgaatgctgttaaggccctggaggttgcaggacctattaaacctaatagtacagtttgcaaactcttacaggagttgcaaaagttgatctggcatcgcgatcagaaattttttatacaacatattagagctcataccaacttgcctggacctctatcaaaaggcaatgagatcgtagatctctgtactagaggggaatatgtatttttcgcttcctctatggaacgagcacagcactttcacaaacaatttcatgtatctgcaaaaactttacagcaaaggtttcagctatctcgagcagaggctagacagatagtattgaattgtcaacagtgtataaccttcttgcacccccctagcctgggggtcaatcccagagggttattgcccttgaagatctggcaaatggacgtaactcatttttcaggatttggaactcttaaatatatccatgtgtctgtggatacctgttcaggcatcatccatgccacccctatgagtggggaaaaggctcgcaatgtcattggacattgccttgaggcgtggcctgcctggggaaaacctcagcaattaaagactgacaatggtcctgcttatacagctcaatcttttacctccttctgtaaacagatggaagtccaattaaaccatggcctgccttataatccccaaggacaaggaatagttgaaagagcccatcgcacattgaaagaatgtttattaaaacaaaaagggggaataggccatggtagaacaccaaaggaacaactatctttggctctctttactctgaattttttaaatttggattctcaaggcctttctgctgccgataggcaccagactcgggcacctgctcagaagggctatgtaaaatggaaagatatccttacgggtctatggcatggaccggacccggtattagcatgggcgagaggttctgtttgtgttttccctcaggatcagcaagacccggtgtggattccagagagactgacgaggaggtgcaacaaacaagatgaagcctccgatattgatcctgctgctgatcttgacaacaccgtggctgatccaggccagagaacaaatcctgtgggccatagcgaaagcgtggccaattcctttgcctgttcatagcacatctaaagttttgcctgttttcttttctactagttgtgaattgggtttgccttgtgtcaatttagatcctgacactgcccagtattcagccactaatatttctctcaatggagcattatgcttctcccttattaataattctaacccatgcatttggttgaagaatggttctattggcaattggcttgatcctcttactaataaccagatctcgagtgctatgctcactgaagccctgtctcagtttagtacaggcgctagttctggctctggcactggtacaaatggaaccaaagatgtaaatatcactacatttctgatgctgatggaggggctccgaccctcaaattcacgctttagtcaagagaactccactgctcgacaagtcttgccttattgtgcacccaatcgaggctatccacctcattggacgccttgtcagagtccggatcacaaacttaagcaaatagctccaggttttgaatttactccccctcttggcaagtaccagtataacctaactcagggaggttcccaaagaacaggcagtaaaaatacctggccatggtttcaatgggtactctccaacgagcgtggagcatttacttctcttgaaccttttgcagttctccagaatctctgcataagacttcttaatgtttctggtacaagggatgagaagggaccttctcttaagaatctatcaatacataaagctttgaataatctcactgttccagctagcccagtatgcttaaaagctccttttttctttctgctctctaatgctactgatgctaccaaagaagtgatctcgtgcaattcgactgatgtctcctgcattgctagccaatgttggaatggttctgctaatacagcagtagtgatgaggattcctatgtatgttcctattccagtcaaagtggatacaggaacgtttcccattacggaaatcatcagaaccaaacgggattttggcataactgcagcattggttactgccattaccctttctgcagcagcggctacgactgccgccgttgccatggctgctcaggtccaatcagctgagacagtcaatgatattgtggaaaaaacagctacaacattaactaccttgagatctattgatggccacttaaaagctggcattctaactgtgaaccaaagagtggacctgttgcaggaacaggtggatgatttagtaaccttaacttccataggatgcattcattccttttcttctttgtgtatcacctccaggatggccaataatttcacggagaacagcaacctgagttggcagttgagtgcctaccttcagggaaattggagtcaacagttcgagaacctgacagacaccctgacacaacagattattgccgtgaatgctacacgcctgagcctgcccactgttaataccctcttaactacccttaagcgagcctttagtttagttaaggaatgggctggaataggggttatgttttccatgatgctgttagccatttttgtttgcttgtggtgcctatgcaggatcaggaagtcgcaaaaatcccaagctgctatgttggtacaggcctttgctgctgtggaagcaggacagtcccctcaagcatggttatccatgctgacagacaaatagatgtctgtctcgcccttgctgagtgagtgatgcgtatctgaatcagtcatgctcaatgacgggcacctaccctcatgctgagcgaataagcatacatgtgttcccttcaacctaagacatgagcctgtgagggcgacacagtgactctttgacgggtaagatagggacactggggttgaacctaagacagagatgactgaaatctgacaacagatagatactgctactcctataatattaaaacaaaaagggggaactgtagagagctgcagaaaaccgcacccaaaagatggcgctggtttccgccttccgccagcccgacggcgagcgctctctgtggtaaacaactccaaatatggtagaggtcatgtatcctcttaattctgcttggagacaacctatcctggcgcgccacgtagggttaggtgattggtagatgtagactatatcaggccccgtctccctcggcctggggccgccgcctccattatacatttgtacaaaagcaaagaggttcccgattaaactgtgtttgaagaagattcctcggtgtggcgtctttcttgctggtcggggttggggttagagggttagtgttagagggttaggtctagagggttagggttagggtnnnnnnnnnnnnnnnnnnnnnnnnnnnnnnnnnnnnnnnnnnnnnnnnnnnnnnnnnnnnnnnnnnnnnnnnnnnnnnnnnnnnnnnnnnnnnnnnnnnntagagggttagggttagggttagagggttagggttagggttagagggttaactctctaagtagactaggctggcctcatagtctgccactgccttctatattaggattaaagtcacaggttaccacacccagcccgggtttttttttttttttttttttttttttttttttgaggaaattatccctttataggtcagcctaccctaaggctcagttaggtccttcttccttggccttgggattacaagtgtgtatcaccatatccatcttgaatcttattttatctttttacattaagagattcagagagaggaatcagcacaaagcatgtatgaaaattttacaatgaaccccattgttttatatgttaattaaaaagggagagagtgatccataaggttggggagtatggtttcatgacagcctgtgtttagcaagtgtgaggccctagattcaaggcctagccctataaatatgtgtgaatatatatatatatatgtatatatatatatatatatatgcatatatatatatgtaagtaataatagtccgtatatttgaaaagattatgaaagactgcctaaatatcatgactgattaaaacaatgcatctcaacagaaacagaaccactggtaaatgacatgtcatatgcatagtactatatagattg
